(19) United States
(12) Patent Application Publication
(10) Pub. No.: US 2021/0228627 A1
(43) Pub. Date: Jul. 29, 2021

(54) FUSOSOME COMPOSITIONS AND USES THEREOF

(71) Applicant: FLAGSHIP PIONEERING INNOVATIONS V, INC., Cambridge, MA (US)

(72) Inventors: Geoffrey A. von Maltzahn, Somerville, MA (US); Jacob Rosenblum Rubens, Cambridge, MA (US); Michael Travis Mee, Montreal (CA); John Miles Milwid, Denver, CO (US); Neal Francis Gordon, Brookline, MA (US); Jagesh Vijaykumar Shah, Lexington, MA (US); Kyle Marvin Trudeau, Boston, MA (US); Brigham Jay Hartley, Long Island City, NY (US); Peter Anthony Jones, Medford, MA (US)

(21) Appl. No.: 17/055,077

(22) PCT Filed: May 15, 2019
(86) PCT No.: PCT/US2019/032488

§ 371 Date: Nov. 12, 2020

Related U.S. Application Data
(60) Provisional application No. 62/695,529, filed on Jul. 9, 2018.
(60) Provisional application No. 62/671,838, filed on May 15, 2018.

(51) Int. Cl. A61K 35/15; C07K 14/005; C12N 15/88; A61K 48/00

(52) U.S. Cl. CPC A61K 35/15; C07K 14/005; C12N 15/88; C12N 2830/007; C12N 2740/10043; C12N 2760/18034; A61K 48/0008

(57) ABSTRACT

The present disclosure provides, at least in part, methods and compositions for in vivo fusosome delivery. In some embodiments, the fusosome comprises a combination of elements that promote specificity for target cells, e.g., one or more of a re-targeted fusogen, a positive target cell-specific regulatory element, and a non-target cell-specific regulatory element. In some embodiments, the fusosome comprises one or more modifications that decrease an immune response against the fusosome.

### CROSS-REFERENCE TO RELATED APPLICATIONS

[0001] This application claims priority to U.S. Ser. No. 62/671,838 filed May 15, 2018 and U.S. Ser. No. 62/695,529 filed Jul. 9, 2018, each of which is incorporated herein by reference in its entirety.

### INCORPORATION BY REFERENCE OF SEQUENCE LISTING

[0002] The present application is being filed along with a Sequence Listing in electronic format. The Sequence Listing is provided as a file entitled V2050-7023WO Sequence Listing.TXT, created May 14, 2019, which is 651 kilobytes in size. The information in the electronic format of the Sequence Listing is incorporated by reference in its entirety.

### BACKGROUND

[0003] Complex biologics are promising therapeutic candidates for a variety of diseases. However, it is difficult to deliver large biologic agents into a cell because the plasma membrane acts as a barrier between the cell and the extracellular space. There is a need in the art for new methods of delivering complex biologics into cells in a subject.

### SUMMARY

[0004] The present disclosure provides, at least in part, fusosome methods and compositions for in vivo delivery. In some embodiments, the fusosome comprises a combination of elements that promote specificity for target cells, e.g., one or more of a re-targeted fusogen, a positive target cell-specific regulatory element, and a non-target cell-specific regulatory element. In some embodiments, the fusosome comprises one or more modifications that decrease an immune response against the fusosome.

### BRIEF DESCRIPTION OF DRAWINGS

[0005] FIGS. 1A-1C are a series of graphs showing results for cell lines, including target human hepatoma cell lines (HepG2) and non-target (non-hepatic) cell lines, transduced with lentivirus (LV) encoding nucleic acid constructs containing positive TCSREs or NTCSREs. FIG. 1A shows GFP expression in human hepatoma cell line (HepG2), human embryonic kidney cell line (293LX), human T-cell line of hematopoietic origin (Molt4.8) and endothelial cell line derived from mouse brain (bEND.3) transduced with LV generated with miRT sequences (hPGK-eGFP+miRT) or without miRT sequences (hPGK-eGFP), under the control of the PGK promoter. FIG. 1B shows GFP expression in HepG2 and 293LX cells transduced with LV generated under the control of the PGK promoter (hPGK-eGFP) or LVs containing mirT sequences and GFP under the control of the hepatocyte specific promoter ApoE (hApoE-eGFP+miRT). FIG. 1C shows quantification of Phenylalanine (Phe) in supernatant of HepG2 and 293LX cells transduced with LVs containing the transgene phenylalanine ammonia lyase (PAL) under the control of the SFFV promoter (SFFV-PAL), or LVs containing mirT sequences and under the control of the hApoE promoter (hApoE-PAL+miRT).

### ENUMERATED EMBODIMENTS

[0006] Provided herein are fusosomes, including retroviral vectors or particles, such as lentiviral vectors or particles, that generally result in increased expression of a desired exogenous agent (e.g., a therapeutic transgene) in target cells compared to non-target cells following introduction of the fusosomes into cells, e.g., in a subject. For example, in some cases, the increase in expression is following in vivo administration of a provided fusosome (e.g. a retroviral vector or particle) to a subject, e.g. human subject. In particular, one of the major challenges for successful gene therapy is the ability to maintain stable, long-term expression of a therapeutic transgene (e.g., an exogenous agent) from genetically modified cells in vivo. Transgene expression in non-target cells such as antigen-presenting cells (APCs) can, in some aspects, result in activation of the adaptive immune response leading to generation of neutralizing antibodies against the transgene product by B-cells and/or elimination of transgene producing cells by T-cells. Thus, limiting transgene expression to target cells may, in some embodiments, substantially impact the durability of transgene expression by avoiding immune clearance. Furthermore, cell-type specific transgene expression may be very relevant to disease biology such as, e.g., limiting expression of pro-apoptotic genes to tumor cells or other target cells (e.g., liver cells).

[0007] In particular, provided herein are fusosomes (e.g. retroviral vector pr particles) that, in some instances, include expression of nucleic acid sequences under the control of or that are regulated by a positive target cell-specific regulatory element (TCSRE, e.g., a tissue-specific promoter) and/or a negative target cell-specific regulatory element (negative TCSRE), e.g., a non-target cell-specific regulatory element (NTCSRE). In some embodiments, the negative TCSCRE, such as NCSRE, is by miRNA-mediated gene silencing, such as by nucleic acid sequences complementatry to miRNA sequences in a cell. In some embodiments, the provided fusosomes (e.g. retroviral vectors or particles) can specifically drive transgene (exogenous agent) expression in a target cell line (e.g. tumor or hepatic cell or other target cell) while restricting or limiting expression in non-target cells.

[0008] Among the provided embodiments are:

1. A fusosome comprising:

[0009] a) a lipid bilayer comprising a retargeted fusogen; and

[0010] b) a nucleic acid that comprises or encodes:
[0011] (i) a positive target cell-specific regulatory element (e.g., a tissue-specific promoter) operatively linked to a nucleic acid encoding an exogenous agent (e.g., exogenous polypeptide or exogenous RNA), wherein the positive tissue-specific regulatory element increases expression of the exogenous agent in a target cell or tissue relative to an otherwise fusosome lacking the positive tissue-specific regulatory element; or
[0012] (ii) a non-target cell-specific regulatory element (e.g., a tissue-specific miRNA recognition sequence), operatively linked to the nucleic acid encoding the exogenous agent, wherein the non-target cell-specific regulatory element decreases expression of the exogenous agent in a non-target cell or tissue relative to an otherwise similar fusosome lacking the non-target cell-specific regulatory element.
   2. A fusosome comprising:

[0013] a) a lipid bilayer comprising a retargeted fusogen;

[0014] b) a nucleic acid that comprises or encodes:
[0015] (i) a positive target cell-specific regulatory element (e.g., a tissue-specific promoter) operatively linked to a nucleic acid encoding an exogenous agent (e.g., exogenous polypeptide or exogenous RNA), wherein the positive tissue-specific regulatory element increases expression of the exogenous agent in a target cell or tissue relative to an otherwise retroviral vector lacking the positive tissue-specific regulatory element; or
[0016] (ii) a negative target cell-specific regulatory element (e.g., a tissue-specific miRNA recognition sequence), operatively linked to the nucleic acid encoding the exogenous agent, wherein the negative tissue-specific regulatory element decreases expression of the exogenous agent in a non-target cell or tissue relative to an otherwise similar retroviral vector lacking the negative tissue-specific regulatory element.
   3. A fusosome comprising:

[0017] a) a lipid bilayer comprising a fusogen (e.g., a re-targeted fusogen);

[0018] b) a nucleic acid that comprises or encodes:
[0019] (i) a positive target cell-specific regulatory element (e.g., a tissue-specific promoter) operatively linked to a nucleic acid encoding an exogenous agent (e.g., exogenous polypeptide or exogenous RNA), wherein the positive tissue-specific regulatory element increases expression of the exogenous agent in a target cell or tissue relative to an otherwise similar fusosome lacking the positive tissue-specific regulatory element; and
[0020] (ii) a non-target cell-specific regulatory element (e.g., a tissue-specific miRNA recognition sequence), operatively linked to the nucleic acid encoding the exogenous agent, wherein the non-target cell-specific regulatory element decreases expression of the exogenous agent in a non-target cell or tissue relative to an otherwise similar fusosome lacking the non-target cell-specific regulatory element.
   4. A fusosome, comprising:

[0021] a) a lipid bilayer comprising a fusogen (e.g., a re-targeted fusogen);

[0022] b) a nucleic acid that comprises or encodes:
[0023] (i) a positive target cell-specific regulatory element (e.g., a tissue-specific promoter) operatively linked to a nucleic acid encoding an exogenous agent (e.g., exogenous polypeptide or exogenous RNA), wherein the positive tissue-specific regulatory element increases expression of the exogenous agent in a target cell or tissue relative to an otherwise retroviral vector lacking the positive tissue-specific regulatory element; and
[0024] (ii) a negative target cell-specific regulatory element (e.g., a tissue-specific miRNA recognition sequence), operatively linked to the nucleic acid encoding the exogenous agent, wherein the negative tissue-specific regulatory element decreases expression of the exogenous agent in a non-target cell or tissue relative to an otherwise similar retroviral vector lacking the negative tissue-specific regulatory element.
   5. The fusosome of any of the preceding embodiments, wherein one or more of:
[0025] i) the fusosome fuses at a higher rate with a target cell than with a non-target cell, e.g., by at least at least 1%, 2%, 3%, 4%, 5%, 10%, 20%, 30%, 40%, 50%, 60%, 70%, 80%, 90%, 2-fold, 3-fold, 4-fold, 5-fold, 10-fold, 20-fold, 50-fold, or 100-fold;
[0026] ii) the fusosome fuses at a higher rate with a target cell than with another fusosome, e.g., by at least 10%, 20%, 30%, 40%, 50%, 60%, 70%, 80%, or 90%, 2-fold, 3-fold, 4-fold, 5-fold, 10-fold, 20-fold, 50-fold, or 100-fold;
[0027] iii) the fusosome fuses with target cells at a rate such that an agent in the fusosome is delivered to at least 10%, 20%, 30%, 40%, 50%, 60%, 70%, 80%, or 90%, of target cells after 24, 48, or 72 hours;
[0028] iv) the fusosome delivers the nucleic acid to a target cell at a higher rate than to a non-target cell, e.g., by at least at least 1%, 2%, 3%, 4%, 5%, 10%, 20%, 30%, 40%, 50%, 60%, 70%, 80%, 90%, 2-fold, 3-fold, 4-fold, 5-fold, 10-fold, 20-fold, 50-fold, or 100-fold;
[0029] v) the fusosome delivers the nucleic acid to a target cell at a higher rate than to another fusosome, e.g., by at least 10%, 20%, 30%, 40%, 50%, 60%, 70%, 80%, or 90%, 2-fold, 3-fold, 4-fold, 5-fold, 10-fold, 20-fold, 50-fold, or 100-fold; or
[0030] vi) the delivers the nucleic acid to a target cell at a rate such that an agent in the fusosome is delivered to at least 10%, 20%, 30%, 40%, 50%, 60%, 70%, 80%, or 90%, of target cells after 24, 48, or 72 hours.
   6. The fusosome of any of the preceding embodiments, wherein one or more of (e.g., 2 or all 3 of) the following apply: the fusosome is a retroviral vector, the lipid bilayer is comprised by an envelope, e.g., a viral envelope, and the nucleic acid is a retroviral nucleic acid.
   7. The fusosome of any of the preceding embodiments, wherein the nucleic acid comprises one or more of (e.g., all of) the following nucleic acid sequences: 5′ LTR (e.g., comprising U5 and lacking a functional U3 domain), Psi packaging element (Psi), Central polypurine tract (cPPT) Promoter operatively linked to the payload gene, e.g. nucleic acid encoding the exogenous agent, payload gene, e.g. nucleic acid encoding the exogenous agent (optionally comprising an intron before the open reading frame), Poly A tail sequence, WPRE, and 3′ LTR (e.g., comprising U5 and lacking a functional U3).
   8. The fusosome of any of the preceding embodiments, which comprises one or more of (e.g., all of) a polymerase (e.g., a reverse transcriptase, e.g., pol or a portion thereof), an integrase (e.g., pol or a portion thereof, e.g., a functional or non-functional variant), a matrix protein (e.g., gag or a portion thereof), a capsid protein (e.g., gag or a portion thereof), a nucleocaspid protein (e.g., gag or a portion thereof), and a protease (e.g., pro).
   9. The fusosome of any of the preceding embodiments, wherein, when the fusosome is administered to a subject, one or more of:
[0031] i) less than 10%, 5%, 4%, 3%, 2%, or 1% of the exogenous agent detectably present in the subject is in non-target cells;
[0032] ii) at least 90%, 95%, 96%, 97%, 98%, or 99% of the cells of the subject that detectably comprise the exogenous agent, are target cells (e.g., cells of a single cell type, e.g., T cells);
[0033] iii) less than 1,000,000, 500,000, 200,000, 100,000, 50,000, 20,000, or 10,000 cells of the cells of the subject that detectably comprise the exogenous agent are non-target cells;
[0034] iv) average levels of the exogenous agent in all target cells in the subject are at least 100-fold, 200-fold, 500-fold, or 1,000-fold higher than average levels of the exogenous agent in all non-target cells in the subject; or
[0035] v) the exogenous agent is not detectable in any non-target cell in the subject.
   10. The fusosome of any of the preceding embodiments, wherein the re-targeted fusogen comprises a sequence chosen from Nipah virus F and G proteins, measles virus F and H proteins, tupaia paramyxovirus F and H proteins, paramyxovirus F and G proteins or F and H proteins or F and HN proteins, Hendra virus F and G proteins, Henipavirus F and G proteins, Morbilivirus F and H proteins, respirovirus F and HN protein, a Sendai virus F and HN protein, rubulavirus F and HN proteins, or avulavirus F and HN proteins, or a derivative thereof, or any combination thereof.
   11. The fusosome of any of the preceding embodiments, wherein the fusogen comprises a domain of at least 40, 50, 60, 80, 100, 200, 300, 400, 500, or 600 amino acids in length having at least 80%, 85%, 90%, 95%, 96%, 97%, 98%, or 99% sequence identity to a wild-type paramyxovirus fusogen, e.g., a sequence of Table 4 or Table 5, optionally wherein the wild-type paramyxovirus fusogen has a sequence set forth in any of SEQ ID NOS: 1-132.
   12. The fusosome of embodiment 11, wherein the paramyxovirus is a Nipah virus, e.g., a henipavirus.
   13. The fusosome of any of the preceding embodiments, wherein the positive target cell-specific regulatory element comprises a tissue-specific promoter, a tissue-specific enhancer, a tissue-specific splice site, a tissue-specific site extending half-life of an RNA or protein, a tissue-specific mRNA nuclear export promoting site, a tissue-specific translational enhancing site, or a tissue-specific post-translational modification site.
   14. The fusosome of any of the preceding embodiments, wherein the non-target cell specific regulatory element or negative TCSRE comprises a tissue-specific miRNA recognition sequence, tissue-specific protease recognition site, tissue-specific ubiquitin ligase site, tissue-specific transcriptional repression site, or tissue-specific epigenetic repression site.
   15. The fusosome of any of the preceding embodiments, wherein the non-target cell specific regulatory element or negative TCSRE comprises a tissue-specific miRNA recognition sequence.
   16. The fusosome of embodiment 15, wherein the non-target cell specific regulatory element or negative TCSRE is situated or encoded within a transcribed region (e.g., the transcribed region encoding the exogenous agent), e.g., such that an RNA produced by the transcribed region comprises the miRNA recognition sequence within a UTR or coding region.
   17. The fusosome of any of the preceding embodiments, wherein the target cell is a cancer cell and the non-target cell is a non-cancerous cell.
   18. The fusosome of any of the preceding embodiments, wherein the nucleic acid, e.g., retroviral nucleic acid, encodes a positive TCSRE and/or a NTCSRE or negative TCSRE.
   19. The fusosome of any of the preceding embodiments, wherein the retroviral nucleic acid comprises the complement of a positive TCSRE and/or a NTCSRE or negative TCSRE.
   20. The fusosome of any of the preceding embodiments, which does not deliver nucleic acid to a non-target cell, e.g., an antigen presenting cell, an MHC class II+ cell, a professional antigen presenting cell, an atypical antigen presenting cell, a macrophage, a dendritic cell, a myeloid dendritic cell, a plasmacyteoid dendritic cell, a CD11c+ cell, a CD11b+ cell, a splenocyte, a B cell, a hepatocyte, a endothelial cell, or a non-cancerous cell.
   21. The fusosome of any of the preceding embodiments, wherein less than 10%, 5%, 2.5%, 1%, 0.5%, 0.1%, 0.01%, 0.001%, 0.0001%, 0.00001%, or 0.000001% of a non-target cell type (e.g., one or more of an antigen presenting cell, an MHC class II+ cell, a professional antigen presenting cell, an atypical antigen presenting cell, a macrophage, a dendritic cell, a myeloid dendritic cell, a plasmacyteoid dendritic cell, a CD11c+ cell, a CD11b+ cell, a splenocyte, a B cell, a hepatocyte, a endothelial cell, or a non-cancerous cell) comprise the nucleic acid, e.g., retroviral nucleic acid, e.g., using quantitative PCR, e.g., using an assay of Example 1.
   22. The fusosome of any of the preceding embodiments, wherein the target cells comprise 0.00001-10, 0.0001-10, 0.001-10, 0.01-10, 0.1-10, 0.5-5, 1-4, 1-3, or 1-2 copies of the nucleic acid, e.g., retroviral nucleic acid or a portion thereof, per host cell genome, e.g., wherein copy number of the nucleic acid is assessed after administration in vivo.
   23. The fusosome of any of the preceding embodiments, wherein:

[0036] less than 10%, 5%, 2.5%, 1%, 0.5%, 0.1%, 0.01% of the non-target cells (e.g., an antigen presenting cell, an MHC class II+ cell, a professional antigen presenting cell, an atypical antigen presenting cell, a macrophage, a dendritic cell, a myeloid dendritic cell, a plasmacyteoid dendritic cell, a CD11c+ cell, a CD11b+ cell, a splenocyte, a B cell, a hepatocyte, a endothelial cell, or a non-cancerous cell) comprise the exogenous agent; or

[0037] the exogenous agent (e.g., protein) is not detectably present in a non-target cell, e.g an antigen presenting cell, an MHC class II+ cell, a professional antigen presenting cell, an atypical antigen presenting cell, a macrophage, a dendritic cell, a myeloid dendritic cell, a plasmacyteoid dendritic cell, a CD11c+ cell, a CD11b+ cell, a splenocyte, a B cell, a hepatocyte, a endothelial cell, or a non-cancerous cell.

24. The fusosome of any of the preceding embodiments, wherein the fusosome delivers the nucleic acid, e.g., retroviral nucleic acid, to a target cell, e.g., a T cell, a CD3+ T cell, a CD4+ T cell, a CD8+ T cell, a hepatocyte, a haematepoietic stem cell, a CD34+ haematepoietic stem cell, a CD105+ haematepoietic stem cell, a CD117+ haematepoietic stem cell, a CD105+ endothelial cell, a B cell, a CD20+ B cell, a CD19+ B cell, a cancer cell, a CD133+ cancer cell, an EpCAM+ cancer cell, a CD19+ cancel cell, a Her2/Neu+ cancer cell, a GluA2+ neuron, a GluA4+ neuron, a NKG2D+ natural killer cell, a SLC1A3+ astrocyte, a SLC7A10+ adipocyte, or a CD30+ lung epithelial cell.
25. The fusosome of any of the preceding embodiments, wherein at least 0.00001%, 0.0001%, 0.001%, 0.001%, 0.01%, 0.1%, 1%, 2%, 5%, 10%, 20%, 30%, 40%, 50%, 60%, 70%, 80%, or 90% of target cells (e.g., one or more of a T cell, a CD3+ T cell, a CD4+ T cell, a CD8+ T cell, a hepatocyte, a haematepoietic stem cell, a CD34+ haematepoietic stem cell, a CD105+ haematepoietic stem cell, a CD117+ haematepoietic stem cell, a CD105+ endothelial cell, a B cell, a CD20+ B cell, a CD19+ B cell, a cancer cell, a CD133+ cancer cell, an EpCAM+ cancer cell, a CD19+ cancel cell, a Her2/Neu+ cancer cell, a GluA2+ neuron, a GluA4+ neuron, a NKG2D+ natural killer cell, a SLC1A3+ astrocyte, a SLC7A10+ adipocyte, or a CD30+ lung epithelial cell) comprise the nucleic acid, e.g., using quantitative PCR, e.g., using an assay of Example 3.
26. The fusosome of any of the preceding embodiments, wherein at least 0.00001%, 0.0001%, 0.001%, 0.001%, 0.01%, 0.1%, 1%, 2%, 5%, 10%, 20%, 30%, 40%, 50%, 60%, 70%, 80%, or 90% of target cells (e.g., a T cell, a CD3+ T cell, a CD4+ T cell, a CD8+ T cell, a hepatocyte, a haematepoietic stem cell, a CD34+ haematepoietic stem cell, a CD105+ haematepoietic stem cell, a CD117+ haematepoietic stem cell, a CD105+ endothelial cell, a B cell, a CD20+ B cell, a CD19+ B cell, a cancer cell, a CD133+ cancer cell, an EpCAM+ cancer cell, a CD19+ cancel cell, a Her2/Neu+ cancer cell, a GluA2+ neuron, a GluA4+ neuron, a NKG2D+ natural killer cell, a SLC1A3+ astrocyte, a SLC7A10+ adipocyte, or a CD30+ lung epithelial cell) comprise the exogenous agent.
27. The fusosome of any of the preceding embodiments, wherein, upon administration, the ratio of target cells comprising the nucleic acid to non-target cells comprising the nucleic acid is at least 1.5, 2, 3, 4, 5, 10, 25, 50, 100, 500, 1000, 5000, 10,000, e.g., according to a quantitative PCR assay, e.g., using assays of Example 1 and Example 3.
28. The fusosome of any of the preceding embodiments, wherein the ratio of the average copy number of nucleic acid or a portion thereof in target cells to the average copy number of nucleic acid or a portion thereof in non-target cells is at least 1.5, 2, 3, 4, 5, 10, 25, 50, 100, 500, 1000, 5000, 10,000, e.g., according to a quantitative PCR assay, e.g., using assays of Example 1 and Example 3.
29. The fusosome of any of the preceding embodiments, wherein the ratio of the median copy number of of nucleic acid or a portion thereof in target cells to the median copy number of nucleic acid or a portion thereof in non-target cells is at least 1.5, 2, 3, 4, 5, 10, 25, 50, 100, 500, 1000, 5000, 10,000, e.g., according to a quantitative PCR assay, e.g., using assays of Example 1 and Example 3.
30. The fusosome of any of the preceding embodiments, wherein the ratio of target cells comprising the exogenous RNA agent to non-target cells comprising the exogenous RNA agent is at least 1.5, 2, 3, 4, 5, 10, 25, 50, 100, 500, 1000, 5000, 10,000, e.g., according to a reverse transcription quantitative PCR assay.
31. The fusosome of any of the preceding embodiments, wherein the ratio of the average exogenous RNA agent level of target cells to the average exogenous RNA agent level of non-target cells is at least 1.5, 2, 3, 4, 5, 10, 25, 50, 100, 500, 1000, 5000, 10,000, e.g., according to a reverse transcription quantitative PCR assay.
32. The fusosome of any of the preceding embodiments, wherein the ratio of the median exogenous RNA agent level of target cells to the median exogenous RNA agent level of non-target cells is at least 1.5, 2, 3, 4, 5, 10, 25, 50, 100, 500, 1000, 5000, 10,000, e.g., according to a reverse transcription quantitative PCR assay.
33. The fusosome of any of the preceding embodiments, wherein the ratio of target cells comprising the exogenous protein agent to non-target cells comprising the exogenous protein agent is at least 1.5, 2, 3, 4, 5, 10, 25, 50, 100, 500, 1000, 5000, 10,000, e.g., according to a FACS assay, e.g., using assays of Example 2 and/or Example 4.
34. The fusosome of any of the preceding embodiments, wherein the ratio of the average exogenous protein agent level of target cells to the average exogenous protein agent level of non-target cells is at least 1.5, 2, 3, 4, 5, 10, 25, 50, 100, 500, 1000, 5000, 10,000, e.g., according to a FACS assay, e.g., using assays of Example 2 and/or Example 4.
35. The fusosome of any of the preceding embodiments, wherein the ratio of the median exogenous protein agent level of target cells to the median exogenous protein agent level of non-target cells is at least 1.5, 2, 3, 4, 5, 10, 25, 50, 100, 500, 1000, 5000, 10,000, e.g., according to a FACS assay, e.g., using assays of Example 2 and/or Example 4.
36. The fusosome of any of the preceding embodiments, which comprises one or both of:
[0038] i) an exogenous or overexpressed immunosuppressive protein on the lipid bilayer, e.g., envelope; and
[0039] ii) an immunostimulatory protein that is absent or present at reduced levels (e.g., reduced by at least 10%, 20%, 30%, 40%, 50%, 60%, 70%, 80%, or 90%) compared to a fusosome generated from an otherwise similar, unmodified source cell.
   37. The fusosome of any of the preceding embodiments, which comprises one or more of:
[0040] i) a first exogenous or overexpressed immunosuppressive protein on the lipid bilayer, e.g., envelope, and a second exogenous or overexpressed immunosuppressive protein on the lipid bilayer, e.g., envelope;
[0041] ii) a first exogenous or overexpressed immunosuppressive protein on the lipid bilayer, e.g., envelope, and a second immunostimulatory protein that is absent or present at reduced levels (e.g., reduced by at least 10%, 20%, 30%, 40%, 50%, 60%, 70%, 80%, or 90%) compared to a fusosome generated from an otherwise similar, unmodified source cell; or
[0042] iii) a first immunostimulatory protein that is absent or present at reduced levels (e.g., reduced by at least 10%, 20%, 30%, 40%, 50%, 60%, 70%, 80%, or 90%) compared to a fusosome generated from an otherwise similar, unmodified source cell and a second immunostimulatory protein that is absent or present at reduced levels (e.g., reduced by at least 10%, 20%, 30%, 40%, 50%, 60%, 70%, 80%, or 90%) compared to a fusosome generated from an otherwise similar, unmodified source cell.
   38. The fusosome of any of the preceding embodiments, wherein the nucleic acid comprises one or more insulator elements.
   39. A fusosome, comprising:

[0043] a) a lipid bilayer comprising a fusogen (e.g., a re-targeted fusogen), and

[0044] b) an exogenous agent (e.g., exogenous polypeptide or exogenous RNA) or a nucleic acid (e.g., a retroviral nucleic acid) encoding an exogenous agent; and

[0045] c) one or more of:
[0046] i) a first exogenous or overexpressed immunosuppressive protein on the lipid bilayer, e.g., envelope, and a second exogenous or overexpressed immunosuppressive protein on the lipid bilayer, e.g., envelope;
[0047] ii) a first exogenous or overexpressed immunosuppressive protein on the lipid bilayer, e.g., envelope, and a second immunostimulatory protein that is absent or present at reduced levels (e.g., reduced by at least 10%, 20%, 30%, 40%, 50%, 60%, 70%, 80%, or 90%) compared to a fusosome generated from an otherwise similar, unmodified source cell; or
[0048] iii) a first immunostimulatory protein that is absent or present at reduced levels (e.g., reduced by at least 10%, 20%, 30%, 40%, 50%, 60%, 70%, 80%, or 90%) compared to a fusosome generated from an otherwise similar, unmodified source cell and a second immunostimulatory protein that is absent or present at reduced levels (e.g., reduced by at least 10%, 20%, 30%, 40%, 50%, 60%, 70%, 80%, or 90%) compared to a fusosome generated from an otherwise similar, unmodified source cell;

[0049] wherein, when administered to a subject (e.g., a human subject or a mouse), one or more of:

[0050] i) the fusosome does not produce a detectable antibody response (e.g., after a single administration or a plurality of administrations), or antibodies against the fusosome are present at a level of less than 10%, 5%, 4%, 3%, 2%, or 1% above a background level, e.g., by a FACS antibody detection assay, e.g., an assay of Example 13 or Example 14);

[0051] ii) the fusosome does not produce a detectable cellular immune response (e.g., T cell response, NK cell response, or macrophage response), or a cellular immune response against the fusosome is present at a level of less than 10%, 5%, 4%, 3%, 2%, or 1% above a background level, e.g., by a PBMC lysis assay (e.g., an assay of Example 5), by an NK cell lysis assay (e.g., an assay of Example 6), by a CD8 killer T cell lysis assay (e.g., an assay of Example 7), by a macrophage phagocytosis assay (e.g., an assay of Example 8);

[0052] iii) the fusosome does not produce a detectable innate immune response, e.g., complement activation (e.g., after a single administration or a plurality of administrations), or the innate immune response against the fusosome is present at a level of less than 10%, 5%, 4%, 3%, 2%, or 1% above a background level, e.g., by a complement activity assay (e.g., an assay of Example 9);

[0053] iv) less than 90%, 80%, 70%, 60%, 50%, 40%, 30%, 20%, 10%, 5%, 4%, 3%, 2%, 1%, 0.5%, 0.2%, 0.1%, 0.05%, 0.02%, 0.01%, 0.005%, 0.002%, or 0.001% of fusosomes are inactivated by serum, e.g., by a serum inactivation assay, e.g., an assay of Example 11 or Example 12;

[0054] v) a target cell that has received the exogenous agent from the fusosome does not produce a detectable antibody response (e.g., after a single administration or a plurality of administrations), or antibodies against the target cell are present at a level of less than 10%, 5%, 4%, 3%, 2%, or 1% above a background level, e.g., by a FACS antibody detection assay, e.g., an assay of Example 15; or

[0055] vi) a target cell that has received the exogenous agent from the fusosome do not produce a detectable cellular immune response (e.g., T cell response, NK cell response, or macrophage response), or a cellular response against the target cell is present at a level of less than 10%, 5%, 4%, 3%, 2%, or 1% above a background level, e.g., by a macrophage phagocytosis assay (e.g., an assay of Example 16), by a PBMC lysis assay (e.g., an assay of Example 17), by an NK cell lysis assay (e.g., an assay of Example 18), or by a CD8 killer T cell lysis assay (e.g., an assay of Example 19).

40. The fusosome of any of the preceding embodiments, wherein one or more of (e.g., 2 or all 3 of) the following apply: the fusosome is a retroviral vector, the lipid bilayer is comprised by an envelope, e.g., a viral envelope, and the nucleic acid is a retroviral nucleic acid.
41. The fusosome of embodiment 39 or 40, wherein the background level is the corresponding level in the same subject prior to administration of the particle or vector.
42. The fusosome of any of embodiments 39-41, wherein the immunosuppressive protein is a complement regulatory protein or CD47.
43. The fusosome of any of embodiments 39-42, wherein the immunostimulatory protein is an MHC (e.g., HLA) protein.
44. The fusosome of any of embodiments 39-43, wherein one or both of: the first exogenous or overexpressed immunosuppressive protein is other than CD47, and the second immunostimulatory protein is other than MHC.
45. A fusosome, comprising:

[0056] a) a lipid bilayer comprising a fusogen,

[0057] b) a nucleic acid encoding an exogenous agent (e.g., exogenous polypeptide or exogenous RNA); and

[0058] c) exogenous or overexpressed MHC, e.g., HLA (e.g., HLA-G or HLA-E), or a combination thereof, on the lipid bilayer.

46. A fusosome comprising:

[0059] a) a lipid bilayer comprising a fusogen, wherein the fusogen comprises a domain of at least 40, 50, 60, 80, 100, 200, 300, 400, 500, or 600 amino acids in length having at least 80%, 85%, 90%, 95%, 96%, 97%, 98%, or 99% sequence identity to a wild-type paramyxovirus fusogen, e.g., a sequence Table 4 or Table 5, optionally wherein the wild-type paramyxovius fusogen is set forth in any one of SEQ ID Nos: 1-132; and

[0060] b) a nucleic acid encoding an exogenous agent (e.g., exogenous polypeptide or exogenous RNA);

[0061] c) exogenous or overexpressed CD47 or a complement regulatory protein, or a combination thereof, on the envelope.

47. A fusosome, comprising:

[0062] a) a lipid bilayer comprising a fusogen, wherein the fusogen comprises a domain of at least 40, 50, 60, 80, 100, 200, 300, 400, 500, or 600 amino acids in length having at least 80%, 85%, 90%, 95%, 96%, 97%, 98%, or 99% sequence identity to a wild-type paramyxovirus fusogen, e.g., a sequence of Table 4 or Table 5, optionally wherein the wild-type paramyxovirus fusosen has a sequence of amino acids set forth in any one of SEQ ID NOS: 1-132, and

[0063] b) a nucleic acid encoding an exogenous agent (e.g., exogenous polypeptide or exogenous RNA); and

[0064] c) MHC I (e.g., HLA-A, HLA-B, or HLA-C) or MHC II (e.g., HLA-DP, HLA-DM, HLA-DOA, HLA-DOB, HLA-DQ, or HLA-DR) that is absent or present at reduced levels (e.g., reduced by at least 10%, 20%, 30%, 40%, 50%, 60%, 70%, 80%, or 90%) compared to a fusosome generated from an otherwise similar, unmodified source cell.

48. A fusosome, comprising:

[0065] a) a lipid bilayer comprising a fusogen, wherein the fusogen comprises a domain of at least 40, 50, 60, 80, 100, 200, 300, 400, 500, or 600 amino acids in length having at least 80%, 85%, 90%, 95%, 96%, 97%, 98%, or 99% sequence identity to a wild-type paramyxovirus fusogen, e.g., a sequence of Table 4 or Table 5, optionally wherein the wild-tpe pramyxovirus fusogen has a sequence set forth in any one of SEQ ID NOS: 1-132; and

[0066] b) a nucleic acid encoding an exogenous agent (e.g., exogenous polypeptide or exogenous RNA); and

[0067] c) one or both of an exogenous or overexpressed immunosuppressive protein or an immunostimulatory protein that is absent or present at reduced levels (e.g., reduced by at least 10%, 20%, 30%, 40%, 50%, 60%, 70%, 80%, or 90%) compared to a fusosome generated from an otherwise similar, unmodified source cell.

49. The fusosome of any of embodiments 45-48, wherein one or more of (e.g., 2 or all 3 of) the following apply: the fusosome is a retroviral vector, the lipid bilayer is comprised by an envelope, e.g., a viral envelope, and the nucleic acid is a retroviral nucleic acid.
50. The fusosome of any of the preceding embodiments, wherein the fusosome is in circulation at least 0.5, 1, 2, 3, 4, 6, 12, 18, 24, 36, or 48 hours after administration to the subject.
51. The fusosome of any of the preceding embodiments, wherein at least 0.001%, 0.01%, 0.1%, 1%, 10%, 20%, 30%, 40%, 50%, 60%, 70%, 80%, 90%, or 100% of fusosomes are in circulation 30 minutes after administration.
52. The fusosome of any of the preceding embodiments, wherein at least 0.001%, 0.01%, 0.1%, 1%, 10%, 20%, 30%, 40%, 50%, 60%, 70%, 80%, 90%, or 100% of fusosomes are in circulation 1 hour after administration.
53. The fusosome of any of the preceding embodiments, wherein at least 0.001%, 0.01%, 0.1%, 1%, 10%, 20%, 30%, 40%, 50%, 60%, 70%, 80%, 90%, or 100% of fusosomes are in circulation 2 hours after administration.
54. The fusosome of any of the preceding embodiments, wherein at least odiments 0.001%, 0.01%, 0.1%, 1%, 10%, 20%, 30%, 40%, 50%, 60%, 70%, 80%, 90%, or 100% of fusosomes are in circulation 4 hours after administration.
55. The fusosome of any of the preceding embodiments, wherein at least 0.001%, 0.01%, 0.1%, 1%, 10%, 20%, 30%, 40%, 50%, 60%, 70%, 80%, 90%, or 100% of fusosomes are in circulation 8 hours after administration.
56. The fusosome of any of the preceding embodiments, wherein at least 0.001%, 0.01%, 0.1%, 1%, 10%, 20%, 30%, 40%, 50%, 60%, 70%, 80%, 90%, or 100% of fusosomes are in circulation 12 hours after administration.
57. The fusosome of any of the preceding embodiments, wherein at least 0.001%, 0.01%, 0.1%, 1%, 10%, 20%, 30%, 40%, 50%, 60%, 70%, 80%, 90%, or 100% of fusosomes are in circulation 18 hours after administration.
58. The fusosome of any of the preceding embodiments, wherein at least 0.001%, 0.01%, 0.1%, 1%, 10%, 20%, 30%, 40%, 50%, 60%, 70%, 80%, 90%, or 100% of fusosomes are in circulation 24 hours after administration.
59. The fusosome of any of the preceding embodiments, wherein at least 0.001%, 0.01%, 0.1%, 1%, 10%, 20%, 30%, 40%, 50%, 60%, 70%, 80%, 90%, or 100% of fusosomes are in circulation 36 hours after administration.
60. The fusosome of any of the preceding embodiments, wherein at least 0.001%, 0.01%, 0.1%, 1%, 10%, 20%, 30%, 40%, 50%, 60%, 70%, 80%, 90%, or 100% of fusosomes are in circulation 48 hours after administration.
61. The fusosome of any of the preceding embodiments, which has a reduction in immunogenicity as measured by a reduction in humoral response following one or more administration of the fusosome to an appropriate animal model, e.g., an animal model described herein, compared to reference retrovirus, e.g., an unmodified fusosome otherwise similar to the fusosome.
62. The fusosome of any of the preceding embodiments, wherein the reduction in humoral response is measured in a serum sample by an anti-cell antibody titre, e.g., anti-retroviral antibody titre, e.g., by ELISA.
63. The fusosome of any of the preceding embodiments, wherein a serum sample from animals administered the retrovirus composition has a reduction of 1%, 5%, 10%, 20%, 30%, 40%, 50%, 60%, 70%, 80%, 90%, or more of an anti-fusosome antibody titer compared to the serum sample from a subject administered an unmodified cell.
64. The fusosome of any of the preceding embodiments, wherein a serum sample from a subject administered the fusosome has an increased anti-cell antibody titre, e.g., increased by 1%, 2%, 5%, 10%, 20%, 30%, or 40% from baseline, e.g., wherein baseline refers to serum sample from the same subject before administration of the fusosome.
65. The fusosome of any of the preceding embodiments, wherein:

[0068] the subject to be administered the fusosome has, or is known to have, or is tested for, a pre-existing antibody (e.g., IgG or IgM) reactive with the fusosome;

[0069] the subject to be administered the fusosome does not have detectable levels of a pre-existing antibody reactive with the fusosome;

[0070] a subject that has received the fusosome has, or is known to have, or is tested for, an antibody (e.g., IgG or IgM) reactive with the fusosome;

[0071] the subject that received the fusosome (e.g., at least once, twice, three times, four times, five times, or more) does not have detectable levels of antibody reactive with the fusosome; or

[0072] levels of antibody do not rise more than 1%, 2%, 5%, 10%, 20%, or 50% between two timepoints, the first timepoint being before the first administration of the fusosome, and the second timepoint being after one or more administrations of the fusosome.

66. The fusosome of any of the preceding embodiments, wherein the fusosome is a retroviral vector produced by the methods of Example 5, 6, or 7, e.g., from cells transfected with HLA-G or HLA-E cDNA.
67. The fusosome of any of the preceding embodiments, wherein the fusosome is a retroviral vector generated from NMC-HLA-G cells and has a decreased percentage of lysis, e.g., PBMC mediated lysis, NK cell mediated lysis, and/or CD8+ T cell mediated lysis, at specific timepoints as compared to retroviral vectors generated from NMCs or NMC-empty vector.
68. The fusosome of any of the preceding embodiments, wherein the modified fusosome evades phagocytosis by macrophages.
69. The fusosome of any of the preceding embodiments, wherein the fusosome is produced by the method of Example 8, e.g., from cells transfected with CD47 cDNA.
70. The fusosome of any of the preceding embodiments, wherein the fusosome is a retroviral vector and wherein the phagocytic index is reduced when macrophages are incubated with retroviral vectors derived from NMC-CD47, versus those derived from NMC, or NMC-empty vector.
71. The fusosome of any of the preceding embodiments, which has a reduction in macrophage phagocytosis, e.g., a reduction of 1%, 5%, 10%, 20%, 30%, 40%, 50%, 60%, 70%, 80%, 90%, or more in macrophage phagocytosis compared to a reference fusosome, e.g., an unmodified fusosome otherwise similar to the fusosome, wherein the reduction in macrophage phagocytosis is determined by assaying the phagocytosis index in vitro, e.g., as described in Example 8.
72. The fusosome of any of the preceding embodiments, wherein a composition comprising a plurality of the fusosomes has a phagocytosis index of 0, 1, 10, 100, or more, e.g., as measured by an assay of Example 8, when incubated with macrophages in an in vitro assay of macrophage phagocytosis.
73. The fusosome of any of the preceding embodiments, which is modified and has reduced complement activity compared to an unmodified retroviral vector.
74. The fusosome of any of the preceding embodiments, which is produced by the methods of Example 9, e.g., from cells transfected with a cDNA coding for complement regulatory proteins, e.g., DAF.
75. The fusosome of any of the preceding embodiments, wherein the fusosome is a retroviral vector, and wherein the dose of retroviral vector at which 200 μg/ml of C3a is present is greater for the modified retroviral vector (e.g., HEK293-DAF) incubated with corresponding mouse sera (e.g., HEK-293 DAF mouse sera) than for the reference retroviral vector (e.g., HEK293 retroviral vector) incubated with corresponding mouse sera (e.g., HEK293 mouse sera).
76. The fusosome of any of the preceding embodiments, wherein the fusosome is a retroviral vector, and wherein the dose of retroviral vector at which 200 μg/ml of C3a is present is greater for for the modified retroviral vector (e.g., HEK293-DAF) incubated with naive mouse sera than for the reference retroviral vector (e.g., HEK293 retroviral vector) incubated with naive mouse sera.
77. The fusosome of any of the preceding embodiments, which is resistant to complement mediated inactivation in patient serum 30 minutes after administration according to an assay of Example 9.
78. The fusosome of any of the preceding embodiments, wherein at least 0.001%, 0.01%, 0.1%, 1%, 10%, 20%, 30%, 40%, 50%, 60%, 70%, 80%, 90%, or 100% of fusosomes are resistant to complement mediated inactivation.
79. The fusosome of any of the preceding embodiments, wherein the complement regulatory protein comprises one or more of proteins that bind decay-accelerating factor (DAF, CD55), e.g. factor H (FH)-like protein-1 (FHL-1), e.g. C4b-binding protein (C4BP), e.g. complement receptor 1 (CD35), e.g. Membrane cofactor protein (MCP, CD46), eg. Protectin (CD59), e.g. proteins that inhibit the classical and alternative complement pathway CD/C5 convertase enzymes, e.g. proteins that regulate MAC assembly.
80. The fusosome of any of the preceding embodiments, which is produced by the methods of Example 10, e.g., from cells transfected with a DNA coding for an shRNA targeting MHC class I, e.g., wherein retroviral vectors derived from NMC-shMHC class I has lower expression of MHC class I compared to NMCs and NMC-vector control.
81. The fusosome of any of the preceding embodiments, wherein a measure of immunogenicity for fusosomes (e.g., retroviral vectors) is serum inactivation, e.g., serum inactivation measured as described herein, e.g., as described in Example 11.
82. The fusosome of any of the preceding embodiments, wherein the percent of cells which receive the exogenous agent is not different between fusosome samples that have been incubated with serum and heat-inactivated serum from fusosome naive mice.
83. The fusosome of any of the preceding embodiments, wherein the percent of cells which receive the exogenous agent is not different between fusosome samples that have been incubated with serum from fusosome naive mice and no-serum control incubations.
84. The fusosome of any of the preceding embodiments, wherein the percent of cells which receive the exogenous agent is less in fusosome samples that have been incubated with positive control serum than in fusosome samples that have been incubated with serum from fusosome naive mice.
85. The fusosome of any of the preceding embodiments, wherein a modified retroviral vector, e.g., modified by a method described herein, has a reduced (e.g., reduced compared to administration of an unmodified retroviral vector) serum inactivation following multiple (e.g., more than one, e.g., 2 or more), administrations of the modified retroviral vector.
86. The fusosome of any of the preceding embodiments, wherein a fusosome described herein is not inactivated by serum following multiple administrations.
87. The fusosome of any of the preceding embodiments, wherein a measure of immunogenicity for fusosome is serum inactivation, e.g., after multiple administrations, e.g., serum inactivation after multiple administrations measured as described herein, e.g., as described in Example 12.
88. The fusosome of any of the preceding embodiments, wherein the percent of cells which receive the exogenous agent is not different between fusosome samples that have been incubated with serum and heat-inactivated serum from mice treated with modified (e.g., HEK293-HLA-G) fusosome.
89. The fusosome of any of the preceding embodiments, wherein the percent of cells which receive the exogenous agent is not different between fusosome samples that have been incubated with serum from mice treated 1, 2, 3, 5 or 10 times with modified (e.g., HEK293-HLA-G) retroviral vectors.
90. The fusosome of any of the preceding embodiments, wherein the percent of cells which receive the exogenous agent is not different between fusosome samples that have been incubated with serum from mice treated with vehicle and from mice treated with modified (e.g., HEK293-HLA-G) fusosomes.
91. The fusosome of any of the preceding embodiments, wherein the percent of cells which receive the exogenous agent is less for fusosomes derived from a reference cell (e.g., HEK293) than for modified (e.g., HEK293-HLA-G) fusosomes.
92. The fusosome of any of the preceding embodiments, wherein a measure of immunogenicity for a fusosome is antibody responses.
93. The fusosome of any of the preceding embodiments, wherein a subject that receives a fusosome described herein has pre-existing antibodies which bind to and recognize the fusosome, e.g., measured as described herein, e.g., as described in Example 13.
94. The fusosome of any of the preceding embodiments, wherein serum from fusosome-naive mice shows more signal (e.g., fluorescence) than the negative control, e.g., serum from a mouse depleted of IgM and IgG, e.g., indicating that immunogenicity has occurred.
95. The fusosome of any of the preceding embodiments, wherein serum from fusosome-naive mice shows similar signal (e.g., fluorescence) compared to the negative control, e.g., indicating that immunogenicity did not detectably occur.
96. The fusosome of any of the preceding embodiments, which comprises a modified retroviral vector, e.g., modified by a method described herein, and which has a reduced (e.g., reduced compared to administration of an unmodified retroviral vector) humoral response following multiple (e.g., more than one, e.g., 2 or more), administrations of the modified retroviral vector e.g., measured as described herein, e.g., as described in Example 14.
97. The fusosome of any of the preceding embodiments, wherein the fusosome, e.g., retroviral vector, is produced by the methods of Example 5, 6, 7, or 14, e.g., from cells transfected with HLA-G or HLA-E cDNA.
98. The fusosome of any of the preceding embodiments, wherein humoral response is assessed by determining a value for the level of anti-fusosome antibodies (e.g., IgM, IgG1, and/or IgG2 antibodies).
99. The fusosome of any of the preceding embodiments, wherein modified (e.g., NMC-HLA-G) fusosomes, e.g., retroviral vectors, have decreased anti-viral IgM or IgG1/2 antibody titers (e.g., as measured by fluorescence intensity on FACS) after injections, as compared to a control, e.g., NMC retroviral vectors or NMC-empty retroviral vectors.
100. The fusosome of any of the preceding embodiments, wherein recipient cells are not targeted by an antibody response, or an antibody response will be below a reference level, e.g., measured as described herein, e.g., as described in Example 15.
101. The fusosome of any of the preceding embodiments, wherein signal (e.g., mean fluorescence intensity) is similar for recipient cells from mice treated with retroviral vectors and mice treated with PBS.
102. The fusosome of any of the preceding embodiments, wherein a measure of the immunogenicity of recipient cells is the macrophage response.
103. The fusosome of any of the preceding embodiments, wherein recipient cells are not targeted by macrophages, or are targeted below a reference level.
104. The fusosome of any of the preceding embodiments, wherein the phagocytic index, e.g., measured as described herein, e.g., as described in Example 16, is similar for recipient cells derived from mice treated with fusosomes and mice treated with PBS.
105. The fusosome of any of the preceding embodiments, wherein a measure of the immunogenicity of recipient cells is the PBMC response.
106. The fusosome of any of the preceding embodiments, wherein recipient cells do not elicit a PBMC response.
107. The fusosome of any of the preceding embodiments, wherein the percent of CD3+/CMG+ cells is similar for recipient cells derived from mice treated with fusosome and mice treated with PBS, e.g., as measured as described herein, e.g., as described in Example 17.
108. The fusosome of any of the preceding embodiments, wherein a measure of the immunogenicity of recipient cells is the natural killer cell response.
109. The fusosome of any of the preceding embodiments, wherein recipient cells do not elicit a natural killer cell response or elicit a lower natural killer cell response, e.g., lower than a reference value.
110. The fusosome of any of the preceding embodiments, wherein the percent of CD3+/CMG+ cells is similar for recipient cells derived from mice treated with fusosome and mice treated with PBS, e.g., as measured as described herein, e.g., as described in Example 18.
111. The fusosome of any of the preceding embodiments, wherein a measure of the immunogenicity of recipient cells is the CD8+ T cell response.
112. The fusosome of any of the preceding embodiments, wherein recipient cells do not elicit a CD8+ T cell response or elicit a lower CD8+ T cell response, e.g., lower than a reference value.
113. The fusosome of any of the preceding embodiments, wherein the percent of CD3+/CMG+ cells is similar for recipient cells derived from mice treated with fusosome and mice treated with PBS, e.g., as measured as described herein, e.g., as described in Example 19.
114. The fusosome of any of the preceding embodiments, wherein the fusogen is a re-targeted fusogen.
115. The fusosome of any of the preceding embodiments, which comprises a retroviral nucleic acid that encodes one or both of: (i) a positive target cell-specific regulatory element operatively linked to a nucleic acid encoding an exogenous agent, or (ii) a non-target cell-specific regulatory element or negative TCSRE operatively linked to the nucleic acid encoding the exogenous agent.
116. A fusosome, comprising:

[0073] a) a lipid bilayer comprising a fusogen, wherein the fusogen comprises a domain of at least 40, 50, 60, 80, 100, 200, 300, 400, 500, or 600 amino acids in length having at least 80%, 85%, 90%, 95%, 96%, 97%, 98%, or 99% sequence identity to a wild-type paramyxovirus fusogen, e.g., a sequence of Table 4 or Table 5, optionally wherein the wild-type pramyxovirus has a sequence of amino acids set forth in any one of SEQ ID NOS: 1-132; and

[0074] b) a nucleic acid encoding an exogenous agent (e.g., exogenous polypeptide or exogenous RNA), wherein the retroviral nucleic acid comprises one or more insulator elements.

117. The fusosome of embodiment 116, wherein one or more of (e.g., 2 or all 3 of) the following apply: the fusosome is a retroviral vector, the lipid bilayer is comprised by an envelope, e.g., a viral envelope, e.g., a pseudotyped envelope, and the nucleic acid is a retroviral nucleic acid.
118. The fusosome of embodiment 116 or 117, wherein the nucleic acid comprises two insulator elements, e.g., a first insulator element upstream of a region encoding the exogenous agent and a second insulator element downstream of a region encoding the exogenous agent, e.g., wherein the first insulator element and second insulator element comprise the same or different sequences.
119. The fusosome of any of embodiments 116-118, wherein variation in the median exogenous agent level in a sample of cells isolated after administration of the fusosome to the subject at a first timepoint is at least, less than, or about 10,000%, 5,000%, 2,000%, 1,000%, 500%, 200%, 100%, 50%, 20%, 10%, or 5% of the median exogenous agent level in a sample of cells isolated after administration of the fusosome to the subject at a second, later timepoint.
120. The fusosome of embodiment 119, wherein the median expression level per cell is assessed only in cells that have a retroviral genome copy number of at least 1.0.
121. The fusosome of any of embodiments 116-120, wherein at least 10%, 20%, 30%, 40%, 50%, 60%, 70%, 80%, or 90% of target cells in the subject detectably comprise the exogenous agent.
122. The fusosome of any of embodiments 119-121, wherein the median payload gene expression level is assessed across cells isolated from the subject 7 days, 14 days, 28 days, 56 days, 112 days, 365 days, 730 days, 1095 days after administration of the fusosome to the subject.
123. The fusosome of any of embodiments 116-122, wherein at least 10%, 20%, 30%, 40%, 50%, 60%, 70%, 80%, or 90% of target cells in the subject that detectably comprised the exogenous agent at a first time point still detectably comprise the exogenous agent at a second, later timepoint, e.g., wherein the first time point is 7 days, 14 days, 28 days, 56 days, 112 days, 365 days, 730 days, 1095 days after administration of the fusosome to the subject.
124. The fusosome of embodiment 123, wherein the second time point is 7 days, 14 days, 28 days, 56 days, 112 days, 365 days, 730 days, 1095 days after the first time point.
125. The fusosome of any of embodiments 116-124, which is not genotoxic or does not increase the rate of tumor formation in target cells compared to target cells not treated with the fusosome.
126. The fusosome of any of embodiments 116-125, wherein the median exogenous agent level is assessed in a population of cells from a subject that has received the fusosome.
127. The fusosome of any of embodiments 116-126, wherein the median exogenous agent level assessed in populations of cells collected (e.g., isolated) from the subject at different days post administration is less than about 10,000% 1000%, 100%, or 10%, e.g., 10,000%-1000%, 1000%-100%, or 100%-10% different from the median exogenous agent level in the population of cells assessed at day 7, day 14, day 28, or day 56, wherein the cells in the population have a vector copy number of at least 1.0.
128. The fusosome of any of embodiments 116-127, wherein exogenous agent level is assessed across cells from a subject that has received the fusosome.
129. The fusosome of any of embodiments 116-128, wherein the percent of cells comprising the exogenous agent is assessed in a plurality of cells collected (e.g., isolated) from the subject 7 days, 14 days, 28 days, 56 days, 112 days, 365 days, 730 days, 1095 days after administration of the fusosome.
130. The fusosome of any of embodiments 116-129, wherein the difference in the percent of cells comprising the exogenous agent assessed in cells isolated at two different days post administration is less than 1%, 5%, 10%, 20%, 50%, 75%, 100%, 150%, 200%, 250%, 300%, 400%, 500%, 750%, 1000%, 1500%, or 2000%.
131. The fusosome of any of embodiments 116-130, wherein the percent of target cells that are positive for the exogenous agent is similar across cells collected at 7 days, 14 days, 28 days, 56 days, 112 days, 365 days, 730 days, or 1095 days.
132. The fusosome of any of embodiments 116-131, wherein:

[0075] at least as many target cells are positive for the exogenous agent 14 days, 28 days, 56 days, 112 days, 365 days, 730 days, or 1095 days as at 7 days;

[0076] at least as many target cells are positive for the exogenous agent at 28 days, 56 days, 112 days, 365 days, 730 days, or 1095 days as at 14 days;

[0077] at least as many target cells are positive for the exogenous agent at 56 days, 112 days, 365 days, 730 days, or 1095 days as at 28 days;

[0078] at least as many target cells are positive for the exogenous agent at 112 days, 365 days, 730 days, or 1095 days as at 56 days;

[0079] at least as many target cells are positive for the exogenous agent at 365 days, 730 days, or 1095 days as at 112 days;

[0080] at least as many target cells are positive for the exogenous agent at 730 days or 1095 days as at 365 days; or

[0081] at least as many target cells are positive for the exogenous agent at 1095 days as at 730 days.

133. The fusosome of any of embodiments 116-132, wherein:

[0082] the median exogenous agent level in target cells that comprise the exogenous agent is similar in cells collected at 7 days, 14 days, 28 days, 56 days, 112 days, 365 days, 730 days, or 1095 days;

[0083] the median exogenous agent level in target cells that comprise the exogenous agent at 14 days, 28 days, 56 days, 112 days, 365 days, 730 days, or 1095 days is at least as high as at 7 days;

[0084] the median exogenous agent level in target cells that comprise the exogenous agent at 28 days, 56 days, 112 days, 365 days, 730 days, or 1095 days is at least as high as at 14 days;

[0085] the median exogenous agent level in target cells that comprise the exogenous agent at 56 days, 112 days, 365 days, 730 days, or 1095 days is at least as high as at 28 days;

[0086] the median exogenous agent level in target cells that comprise the exogenous agent at 112 days, 365 days, 730 days, or 1095 days is at least as high as at 56 days;

[0087] the median exogenous agent level in target cells that comprise the exogenous agent at 365 days, 730 days, or 1095 days is at least as high as at 112 days;

[0088] the median exogenous agent level in target cells that comprise the exogenous agent at 730 days, or 1095 days is at least as high as at 365 days; or

[0089] the median exogenous agent level in target cells that comprise the exogenous agent at 1095 days is at least as high as at 730 days.

134. A method of delivering an exogenous agent to a subject (e.g., a human subject) comprising administering to the subject a fusosome of any of the preceding embodiments, thereby delivering the exogenous agent to the subject.
135. A method of modulating a function, in a subject (e.g., a human subject), target tissue or target cell, comprising contacting, e.g., administering to, the subject, the target tissue or the target cell a fusosome of any of the preceding embodiments.
136. The method of embodiment 135, wherein the target tissue or the target cell is present in a subject.
137. A method of treating or preventing a disorder, e.g., a cancer, in a subject (e.g., a human subject) comprising administering to the subject a fusosome of any of the preceding embodiments.
138. A method of making a fusosome of any of the preceding embodiments, comprising:

[0090] a) providing a source cell that comprises the nucleic acid and the fusogen (e.g., re-targeted fusogen);

[0091] b) culturing the source cell under conditions that allow for production of the fusosome, and

[0092] c) separating, enriching, or purifying the fusosome from the source cell, thereby making the fusosome.

139. A source cell for producing a fusosome, comprising:

[0093] a) a nucleic acid;

[0094] b) structural proteins that can package the nucleic acid, wherein at least one structural protein comprises a fusogen that binds a fusogen receptor; and

[0095] c) a fusogen receptor that is absent or present at reduced levels (e.g., reduced by at least 10%, 20%, 30%, 40%, 50%, 60%, 70%, 80%, or 90%) compared to an otherwise similar, unmodified source cell.

140. The method of embodiment 138 or the source cell of embodiment 139, wherein one or more of (e.g., 2 or all 3 of) the following apply: the fusosome is a retroviral vector, the nucleic acid is a retroviral nucleic acid, and the structural protein is a viral structural protein.
141. The source cell of embodiment 139 or 140, wherein the fusogen causes fusion of the fusosome with the target cell upon binding to the fusogen receptor.
142. The source cell of any of embodiments 139-141, which binds to the second similar source cell, e.g., the fusogen of the source cell binds to the fusogen receptor on the second source cell.
143. A population of source cells of any of embodiments 139-142.
144. The population of source cells of embodiment 143, wherein less than 10%, 5%, 4%, 3%, 2%, or 1% of cells in the population are multinucleated.
145. The source cell or population of source cells of any of embodiments 139-144, wherein a source cell is modified to have reduced fusion (e.g., to not fuse) with other source cells during manufacturing of a fusosome described herein.
146. The source cell or population of source cells of any of embodiments 139-145, wherein the fusogen (e.g., re-targeted fusogen) does not bind to a protein comprised by a source cell, e.g., to a protein on the surface of the source cell.
147. The source cell or population of source cells of any of embodiments 139-146, wherein the fusogen (e.g., re-targeted fusogen) binds to a protein comprised by a source cell, but does not fuse with the cell.
148. The source cell or population of source cells of any of embodiments 139-147, wherein the fusogen does not induce fusion with a source cell.
149. The source cell or population of source cells of any of embodiments 139-148, wherein the source cell does not express a protein (e.g., an antigen) that binds the fusogen.
150. The source cell or population of source cells of any of embodiments 139-149, a plurality of source cells do not form a syncytium when expressing the fusogen, or less than 50%, 40%, 30%, 20%, 10%, 5%, 4%, 3%, 2%, or 1% of cells in the population are multinucleated (e.g., comprise two or more nuclei).
151. The source cell or population of source cells of any of embodiments 139-150, wherein a plurality of source cells do not form a syncytium when producing fusosomes, or less than 50%, 40%, 30%, 20%, 10%, 5%, 4%, 3%, 2%, or 1% of cells in the population are multinucleated.
152. The source cell or population of source cells of any of embodiments 139-151, wherein less than 50%, 40%, 30%, 20%, 10%, 5%, 4%, 3%, 2%, or 1% of the nuclei in the population are in syncytia.
153. The source cell or population of source cells of any of embodiments 139-152, wherein at least 50%, 60%, 70%, 80%, 90%, 95%, 96%, 97%, 98%, 99% of nuclei in the population are in uninuclear cells.
154. The source cell or population of source cells of any of embodiments 139-153, wherein the percentage of cells that are multinucleated is lower in a population of the modified source cells compared to an otherwise similar population of unmodified source cell, e.g., lower by at least 10%, 20%, 30%, 40%, 50%, 60%, 70%, 80%, 90%, 95%, 96%, 97%, 98%, or 99%.
155. The source cell or population of source cells of any of embodiments 139-154, wherein the percent of nuclei present in syncytia is lower in a population of the modified source cells compared to an otherwise similar population of unmodified source cell, e.g., lower by at least 10%, 20%, 30%, 40%, 50%, 60%, 70%, 80%, 90%, 95%, 96%, 97%, 98%, or 99%.
156. The source cell or population of source cells of any of embodiments 139-155, wherein multinucleated cells (e.g., cells having two or more nuclei) are detected by a microscopy assay, e.g., using a DNA stain, e.g., an assay of Example 20.
157. The source cell or population of source cells of any of embodiments 139-156, wherein the functional fusosomes (e.g., viral particles) obtained from the modified source cells is at least 10%, 20%, 40%, 40%, 50%, 60%, 70%, 8-%, 90%, 2-fold, 5-fold, or 10-fold greater than the number of fusosomes obtained from otherwise similar unmodified source cells, e.g., using an assay of Example 20.
158. A fusosome that lacks a fusogen receptor or comprises a fusogen receptor that is present at reduced levels (e.g., reduced by at least 10%, 20%, 30%, 40%, 50%, 60%, 70%, 80%, or 90%) compared to an unmodified fusosome from an otherwise similar source cell.
159. A method of making a fusosome, comprising:

[0096] a) providing a source cell that comprises a fusogen (e.g., re-targeted fusogen), wherein the source cell lacks a fusogen receptor or comprises a fusogen receptor that is present at reduced levels (e.g., reduced by at least 10%, 20%, 30%, 40%, 50%, 60%, 70%, 80%, or 90%) compared to an otherwise similar, unmodified source cell;

[0097] b) culturing the source cell under conditions that allow for production of the fusosome, and

[0098] c) separating, enriching, or purifying the fusosome from the source cell, thereby making the fusosome.

160. The method of embodiment 159, wherein providing the source cell comprises knocking down or knocking out the fusogen receptor in the source cell or a precursor thereof.
161. The fusosome of embodiment 158 or the method of embodiment 159 or 160, wherein the fusosome is a retroviral vector or retrovirus like particle.
162. A retroviral vector (e.g., suitable for in vivo use in a human subject), comprising:

[0099] a) an envelope comprising a retargeted fusogen;

[0100] b) a retroviral nucleic acid that comprises or encodes:
[0101] (i) a positive target cell-specific regulatory element (e.g., a tissue-specific promoter) operatively linked to a nucleic acid encoding an exogenous agent (e.g., exogenous polypeptide or exogenous RNA), wherein the positive tissue-specific regulatory element increases expression of the exogenous agent in a target cell or tissue relative to an otherwise retroviral vector lacking the positive tissue-specific regulatory element; or
[0102] (ii) a negative target cell-specific regulatory element (e.g., a tissue-specific miRNA recognition sequence), operatively linked to the nucleic acid encoding the exogenous agent, wherein the negative tissue-specific regulatory element decreases expression of the exogenous agent in a non-target cell or tissue relative to an otherwise similar retroviral vector lacking the negative tissue-specific regulatory element.
   163. A retroviral vector (e.g., suitable for in vivo use in a human subject), comprising:

[0103] a) an envelope comprising a fusogen (e.g., a re-targeted fusogen);

[0104] b) a retroviral nucleic acid that comprises or encodes:
[0105] (i) a positive target cell-specific regulatory element (e.g., a tissue-specific promoter) operatively linked to a nucleic acid encoding an exogenous agent (e.g., exogenous polypeptide or exogenous RNA), wherein the positive tissue-specific regulatory element increases expression of the exogenous agent in a target cell or tissue relative to an otherwise retroviral vector lacking the positive tissue-specific regulatory element; and
[0106] (ii) a negative target cell-specific regulatory element (e.g., a tissue-specific miRNA recognition sequence), operatively linked to the nucleic acid encoding the exogenous agent, wherein the negative tissue-specific regulatory element decreases expression of the exogenous agent in a non-target cell or tissue relative to an otherwise similar retroviral vector lacking the negative tissue-specific regulatory element.
   164. The retroviral vector of either of the preceding embodiments, wherein, when administered to a subject, one or more of:
[0107] i) less than 10%, 5%, 4%, 3%, 2%, or 1% of the exogenous agent detectably present in the subject is in non-target cells;
[0108] ii) at least 90%, 95%, 96%, 97%, 98%, or 99% of the cells of the subject that detectably comprise the exogenous agent, are target cells (e.g., cells of a single cell type, e.g., T cells);
[0109] iii) less than 1,000,000, 500,000, 200,000, 100,000, 50,000, 20,000, or 10,000 cells of the cells of the subject that detectably comprise the exogenous agent are non-target cells;
[0110] iv) average levels of the exogenous agent in all target cells in the subject are at least 100-fold, 200-fold, 500-fold, or 1,000-fold higher than average levels of the exogenous agent in all non-target cells in the subject; or
[0111] v) the exogenous agent is not detectable in any non-target cell in the subject.
   165. The retroviral vector of any of the preceding embodiments, wherein the re-targeted fusogen comprises a sequence chosen from Nipah virus F and G proteins, measles virus F and H proteins, tupaia paramyxovirus F and H proteins, paramyxovirus F and G proteins or F and H proteins or F and HN proteins, Hendra virus F and G proteins, Henipavirus F and G proteins, Morbilivirus F and H proteins, respirovirus F and HN protein, a Sendai virus F and HN protein, rubulavirus F and HN proteins, or avulavirus F and HN proteins, or a derivative thereof, or any combination thereof.
   166. The retroviral vector of any of the preceding embodiments, wherein the fusogen comprises a domain of at least 40, 50, 60, 80, 100, 200, 300, 400, 500, or 600 amino acids in length having at least 80%, 85%, 90%, 95%, 96%, 97%, 98%, or 99% sequence identity to a wild-type paramyxovirus fusogen, e.g., a sequence of Table 4 or Table 5, optionally wherein the wild-type paramyxovirus fusogen has a sequence of amino acids set forth in any one of SEQ ID NOS: 1-132.
   167. The retroviral vector of embodiment 166, wherein the paramyxovirus is a Nipah virus, e.g., a henipavirus.
   168. The retroviral vector of any of the preceding embodiments, wherein the positive target cell-specific regulatory element comprises a tissue-specific promoter, a tissue-specific enhancer, a tissue-specific splice site, a tissue-specific site extending half-life of an RNA or protein, a tissue-specific mRNA nuclear export promoting site, a tissue-specific translational enhancing site, or a tissue-specific post-translational modification site.
   169. The retroviral vector of any of the preceding embodiments, wherein the negative target cell specific regulatory element comprises a tissue-specific miRNA recognition sequence, tissue-specific protease recognition site, tissue-specific ubiquitin ligase site, tissue-specific transcriptional repression site, or tissue-specific epigenetic repression site.
   170. The retroviral vector of any of the preceding embodiments, wherein the negative target cell specific regulatory element comprises a tissue-specific miRNA recognition sequence.
   171. The retroviral vector of embodiment 170, wherein the negative target cell specific regulatory element is situated or encoded within a transcribed region (e.g., the transcribed region encoding the exogenous agent), e.g., such that an RNA produced by the transcribed region comprises the miRNA recognition sequence within a UTR or coding region.
   172. The retroviral vector of any of the preceding embodiments, wherein the target cell is a cancer cell and the non-target cell is a non-cancerous cell.
   173. The retroviral vector of any of the preceding embodiments, wherein the retroviral nucleic acid encodes a positive TCSRE and/or a negative TCSRE.
   174. The retroviral vector of any of the preceding embodiments, wherein the retroviral nucleic acid comprises the complement of a positive TCSRE and/or a negative TCSRE.
   175. The retroviral vector of any of the preceding embodiments, which does not deliver nucleic acid to a non-target cell, e.g., an antigen presenting cell, an MHC class 11+ cell, a professional antigen presenting cell, an atypical antigen presenting cell, a macrophage, a dendritic cell, a myeloid dendritic cell, a plasmacyteoid dendritic cell, a CD I 1e+ cell, a CD11b+ cell, a splenocyte, a B cell, a hepatocyte, a endothelial cell, or a non-cancerous cell.
   176. The retroviral vector of any of the preceding embodiments, wherein less than 10%, 5%, 2.5%, 1%, 0.5%, 0.1%, 0.01%, 0.001%, 0.0001%, 0.00001%, or 0.000001% of a non-target cell type (e.g., one or more of an antigen presenting cell, an MHC class II+ cell, a professional antigen presenting cell, an atypical antigen presenting cell, a macrophage, a dendritic cell, a myeloid dendritic cell, a plasmacyteoid dendritic cell, a CD I 1e+ cell, a CD11b+ cell, a splenocyte, a B cell, a hepatocyte, a endothelial cell, or a non-cancerous cell) comprise the retroviral nucleic acid, e.g., using quantitative PCR, e.g., using an assay of Example 1.
   177. The retroviral vector of any of the preceding embodiments, wherein the target cells comprise 0.00001-10, 0.0001-10, 0.001-10, 0.01-10, 0.1-10, 0.5-5, 1-4, 1-3, or 1-2 copies of the retroviral nucleic acid or a portion thereof, per host cell genome, e.g., wherein copy number of the retroviral nucleic acid is assessed after administration in vivo.
   178. The retroviral vector of any of the preceding embodiments, wherein: less than 10%, 5%, 2.5%, 1%, 0.5%, 0.1%, 0.01% of the non-target cells (e.g., an antigen presenting cell, an MHC class II+ cell, a professional antigen presenting cell, an atypical antigen presenting cell, a macrophage, a dendritic cell, a myeloid dendritic cell, a plasmacyteoid dendritic cell, a CD11c+ cell, a CD11b+ cell, a splenocyte, a B cell, a hepatocyte, a endothelial cell, or a non-cancerous cell) comprise the exogenous agent; or the exogenous agent (e.g., protein) is not detectably present in a non-target cell, e.g an antigen presenting cell, an MHC class II+ cell, a professional antigen presenting cell, an atypical antigen presenting cell, a macrophage, a dendritic cell, a myeloid dendritic cell, a plasmacyteoid dendritic cell, a CD11c+ cell, a CD11b+ cell, a splenocyte, a B cell, a hepatocyte, a endothelial cell, or a non-cancerous cell.
   179. The retroviral vector of any of the preceding embodiments, wherein the retroviral vector delivers the retroviral nucleic acid to a target cell, e.g., a T cell, a CD3+ T cell, a CD4+ T cell, a CDS+ T cell, a hepatocyte, a haematepoietic stem cell, a CD34+ haematepoietic stem cell, a CD I05+ haematepoietic stem cell, a CD117+ haematepoietic stem cell, a CD I05+ endothelial cell, a B cell, a CD20+ B cell, a CD19+ B cell, a cancer cell, a CD133+ cancer cell, an EpCAM+ cancer cell, a CD19+ cancel cell, a Her2/Neu+ cancer cell, a GluA2+ neuron, a GluA4+ neuron, a NKG2D+ natural killer cell, a SLCIA3+ astrocyte, a SLC7AIO+ adipocyte, or a CD30+ lung epithelial cell.
   180. The retroviral vector of any of the preceding embodiments, wherein at least 0.00001%, 20 0.0001%, 0.001%, 0.001%, 0.01%, 0.1%, 1%, 2%, 5%, 10%, 20%, 30%, 40%, 50%, 60%, 70%, 80%, or 90% of target cells (e.g., one or more of a T cell, a CD3+ T cell, a CD4+ T cell, a CDS+ T cell, a hepatocyte, a haematepoietic stem cell, a CD34+ haematepoietic stem cell, a CD I05+ haematepoietic stem cell, a CD117+ haematepoietic stem cell, a CD I05+ endothelial cell, a B cell, a CD20+ B cell, a CD19+ B cell, a cancer cell, a CD133+ cancer cell, an EpCAM+ cancer cell, a CD19+ cancel cell, a Her2/Neu+ cancer cell, a GluA2+ neuron, a GluA4+ neuron, a NKG2D+ natural killer cell, a SLCIA3+ astrocyte, a SLC7AIO+ adipocyte, or a CD30+ lung epithelial cell) comprise the retroviral nucleic acid, e.g., using quantitative PCR, e.g., using an assay of Example 3.
   181. The retroviral vector of any of the preceding embodiments, wherein at least 0.00001%, 0.0001%, 0.001%, 0.001%, 0.01%, 0.1%, I %, 2%, 5%, 10%, 20%, 30%, 40%, 50%, 60%, 70%, 80%, or 90% of target cells (e.g., a T cell, a CD3+ T cell, a CD4+ T cell, a CDS+ T cell, a hepatocyte, a haematepoietic stem cell, a CD34+ haematepoietic stem cell, a CD I05+ haematepoietic stem cell, a CD117+ haematepoietic stem cell, a CD I05+ endothelial cell, a B cell, a CD20+ B cell, a CD19+ B cell, a cancer cell, a CD133+ cancer cell, an EpCAM+ cancer cell, a CD19+ cancel cell, a Her2/Neu+ cancer cell, a GluA2+ neuron, a GluA4+ neuron, a NKG2D+ natural killer cell, a SLCIA3+ astrocyte, a SLC7AIO+ adipocyte, or a CD30+ lung epithelial cell) comprise the exogenous agent.
   182. The retroviral vector of any of the preceding embodiments, wherein, upon administration, the ratio of target cells comprising the retroviral nucleic acid to non-target cells comprising the retroviral nucleic acid is at least 1.5, 2, 3, 4, 5, 10, 25, 50, 100, 500, 1000, 5000, 10,000, e.g., according to a quantitative PCR assay, e.g., using assays of Example 1 and Example 3.
   183. The retroviral vector of any of the preceding embodiments, wherein the ratio of the average copy number of retroviral nucleic acid or a portion thereof in target cells to the average copy number of retroviral nucleic acid or a portion thereof in non-target cells is at least 1.5, 2, 3, 4, 5, 10, 25, 50, 100, 500, 1000, 5000, 10,000, e.g., according to a quantitative PCR assay, e.g., using assays of Example 1 and Example 3.
   184. The retroviral vector of any of the preceding embodiments, wherein the ratio of the median copy number of of retroviral nucleic acid or a portion thereof in target cells to the median copy number of retroviral nucleic acid or a portion thereof in non-target cells is at least 1.5, 2, 3, 4, 5, 10, 25, 50, 100, 500, 1000, 5000, 10,000, e.g., according to a quantitative PCR assay, e.g., using assays of Example 1 and Example 3.
   185. The retroviral vector of any of the preceding embodiments, wherein the ratio of target cells comprising the exogenous RNA agent to non-target cells comprising the exogenous RNA agent is at least 1.5, 2, 3, 4, 5, 10, 25, 50, 100, 500, 1000, 5000, 10,000, e.g., according to a reverse transcription quantitative PCR assay.
   186. The retroviral vector of any of the preceding embodiments, wherein the ratio of the average exogenous RNA agent level of target cells to the average exogenous RNA agent level of non-target cells is at least 1.5, 2, 3, 4, 5, 10, 25, 50, 100, 500, 1000, 5000, 10,000, e.g., according to a reverse transcription quantitative PCR assay.
   187. The retroviral vector of any of the preceding embodiments, wherein the ratio of the median exogenous RNA agent level of target cells to the median exogenous RNA agent level of non-target cells is at least 1.5, 2, 3, 4, 5, 10, 25, 50, 100, 500, 1000, 5000, 10,000, e.g., according to a reverse transcription quantitative PCR assay.
   188. The retroviral vector of any of the preceding embodiments, wherein the ratio of target cells comprising the exogenous protein agent to non-target cells comprising the exogenous protein agent is at least 1.5, 2, 3, 4, 5, 10, 25, 50, 100, 500, 1000, 5000, 10,000, e.g., according to a FACS assay, e.g., using assays of Example 2 and/or Example 4.
   189. The retroviral vector of any of the preceding embodiments, wherein the ratio of the average exogenous protein agent level of target cells to the average exogenous protein agent level of non-target cells is at least 1.5, 2, 3, 4, 5, 10, 25, 50, 100, 500, 1000, 5000, 10,000, e.g., according to a FACS assay, e.g., using assays of Example 2 and/or Example 4.
   190. The retroviral vector of any of the preceding embodiments, wherein the ratio of the median exogenous protein agent level of target cells to the median exogenous protein agent level of non-target cells is at least 1.5, 2, 3, 4, 5, 10, 25, 50, 100, 500, 1000, 5000, 10,000, e.g., according to a FACS assay, e.g., using assays of Example 2 and/or Example 4.
   191. The retroviral vector of any of the preceding embodiments, which comprises one or both of:
[0112] i) an exogenous or overexpressed immunosuppressive protein on the envelope; and
[0113] ii) an immunostimulatory protein that is absent or present at reduced levels (e.g., reduced by at least 10%, 20%, 30%, 40%, 50%, 60%, 70%, 80%, or 90%) compared to a retroviral vector generated from an otherwise similar, unmodified source cell.
   192. The retroviral vector of any of the preceding embodiments, which comprises one or more of:
[0114] i) a first exogenous or overexpressed immunosuppressive protein on the envelope and a second exogenous or overexpressed immunosuppressive protein on the envelope;
[0115] ii) a first exogenous or overexpressed immunosuppressive protein on the envelope and a second immunostimulatory protein that is absent or present at reduced levels (e.g., reduced by at least 10%, 20%, 30%, 40%, 50%, 60%, 70%, 80%, or 90%) compared to a retrovirus-like particle or retroviral vector generated from an otherwise similar, unmodified source cell; or
[0116] iii) a first immunostimulatory protein that is absent or present at reduced levels (e.g., reduced by at least 10%, 20%, 30%, 40%, 50%, 60%, 70%, 80%, or 90%) compared to a retrovirus-like particle or retroviral vector generated from an otherwise similar, unmodified source cell and a second immunostimulatory protein that is absent or present at reduced levels (e.g., reduced by at least 10%, 20%, 30%, 40%, 50%, 60%, 70%, 80%, or 90%) compared to a retrovirus-like particle or retroviral vector generated from an otherwise similar, unmodified source cell.
   193. The retroviral vector of any of the preceding embodiments, wherein the retroviral nucleic acid comprises one or more insulator elements.
   194. A retrovirus-like particle or retroviral vector (e.g., a particle or vector suitable for in vivo use in a human subject), comprising:

[0117] a) an envelope comprising a fusogen (e.g., a re-targeted fusogen), and

[0118] b) an exogenous agent (e.g., exogenous polypeptide or exogenous RNA) or a nucleic acid (e.g., a retroviral nucleic acid) encoding an exogenous agent; and

[0119] c) one or more of:
[0120] i) a first exogenous or overexpressed immunosuppressive protein on the envelope and a second exogenous or overexpressed immunosuppressive protein on the envelope;
[0121] ii) a first exogenous or overexpressed immunosuppressive protein on the envelope and a second immunostimulatory protein that is absent or present at reduced levels (e.g., reduced by at least 10%, 20%, 30%, 40%, 50%, 60%, 70%, 80%, or 90%) compared to a retrovirus-like particle or retroviral vector generated from an otherwise similar, unmodified source cell; or
[0122] iii) a first immunostimulatory protein that is absent or present at reduced levels (e.g., reduced by at least 10%, 20%, 30%, 40%, 50%, 60%, 70%, 80%, or 90%) compared to a retrovirus-like particle or retroviral vector generated from an otherwise similar, unmodified source cell and a second immunostimulatory protein that is absent or present at reduced levels (e.g., reduced by at least 10%, 20%, 30%, 40%, 50%, 60%, 70%, 80%, or 90%) compared to a retrovirus-like particle or retroviral vector generated from an otherwise similar, unmodified source cell; wherein, when administered to a subject (e.g., a human subject or a mouse), one or more of:
   [0123] i) the particle or vector does not produce a detectable antibody response (e.g., after a single administration or a plurality of administrations), or antibodies against the particle or vector are present at a level of less than 10%, 5%, 4%, 3%, 2%, or I % above a background level, e.g., by a FACS antibody detection assay, e.g., an assay of Example 13 or Example 14);
   [0124] ii) the particle or vector does not produce a detectable cellular immune response (e.g., T cell response, NK cell response, or macrophage response), or a cellular immune response against the particle or vector is present at a level of less than 10%, 5%, 4%, 3%, 2%, or I % above a background level, e.g., by a PBMC lysis assay (e.g., an assay of Example 5), by an NK cell lysis assay (e.g., an assay of Example 6), by a CDS killer T cell lysis assay (e.g., an assay of Example 7), by a macrophage phagocytosis assay (e.g., an assay of Example 8);
   [0125] iii) the particle or vector does not produce a detectable innate immune response, e.g., complement activation (e.g., after a single administration or a plurality of administrations), or the innate immune response against the particle or vector is present at a level of less than 10%, 5%, 4%, 3%, 2%, or I % above a background level, e.g., by a complement activity assay (e.g., an assay of Example 9);
   [0126] iv) less than 90%, 80%, 70%, 60%, 50%, 40%, 30%, 20%, 10%, 5%, 4%, 3%, 2%, 1%, 0.5%, 0.2%, 0.1%, 0.05%, 0.02%, 0.01%, 0.005%, 0.002%, or 0.001% of viruses are inactivated by serum, e.g., by a serum inactivation assay, e.g., an assay of Example 11 or Example 12;
   [0127] v) a target cell that has received the exogenous agent from the particle or vector do not produce a detectable antibody response (e.g., after a single administration or a plurality of administrations), or antibodies against the target cell are present at a level of less than 10%, 5%, 4%, 3%, 2%, or I % above a background level, e.g., by a FACS antibody detection assay, e.g., an assay of Example 15; or
   [0128] vi) a target cell that has received the exogenous agent from the particle or vector do not produce a detectable cellular immune response (e.g., T cell response, NK cell response, or macrophage response), or a cellular response against the target cell is present at a level of less than 10%, 5%, 4%, 3%, 2%, or I % above a background level, e.g., by a macrophage phagocytosis assay (e.g., an assay of Example 16), by a PBMC lysis assay (e.g., an assay of Example 17), by an NK cell lysis assay (e.g., an assay of Example 18), or by a CDS killer T cell lysis assay (e.g., an assay of Example 19).
      195. The retrovirus-like particle or retroviral vector of embodiment 194, wherein the background level is the corresponding level in the same subject prior to administration of the particle or vector.
      196. The retrovirus-like particle or retroviral vector of embodiments 194 or 195, wherein the immunosuppressive protein is a complement regulatory protein or CD47.
      197. The retrovirus-like particle or retroviral vector of any of embodiments 194-196, wherein the immunostimulatory protein is an MHC (e.g., HLA) protein.
      198. The retrovirus-like particle or retroviral vector of any of embodiments 194-197, wherein one or both of: the first exogenous or overexpressed immunosuppressive protein is other than CD47, and the second immunostimulatory protein is other than MHC.
      199. A retrovirus-like particle or retroviral vector (e.g., a particle or vector suitable for in vivo use in a human subject), comprising:
[0129] a) an envelope comprising a fusogen, and
[0130] b) a retroviral nucleic acid encoding an exogenous agent (e.g., exogenous polypeptide or exogenous RNA);
[0131] c) exogenous or overexpressed MHC, e.g., HLA (e.g., HLA-G or HLA-E), or a combination thereof, on the envelope.
   200. A pseudotyped retrovirus-like particle or retroviral vector (e.g., a particle or vector suitable for in vivo use in a human subject), comprising:
[0132] a) a pseudotyped envelope comprising a fusogen, wherein the fusogen comprises a domain of at least 40, 50, 60, 80, 100, 200, 300, 400, 500, or 600 amino acids in length having at least 80%, 85%, 90%, 95%, 96%, 97%, 98%, or 99% sequence identity to a wild-type paramyxovirus fusogen, e.g., a sequence Table 4 or Table 5, optionally wherein the wild-type paramyxovirus fusogen has a sequence of amino acids set forth in any one of SEQ ID NOS: 1-132; and
[0133] b) a retroviral nucleic acid encoding an exogenous agent (e.g., exogenous polypeptide or exogenous RNA);
[0134] c) exogenous or overexpressed CD47 or a complement regulatory protein, or a combination thereof, on the envelope.
   201. A pseudotyped retrovirus-like particle or retroviral vector (e.g., a particle or vector suitable for in vivo use in a human subject), comprising:
[0135] a) a pseudotyped envelope comprising a fusogen, wherein the fusogen comprises a domain of at least 40, 50, 60, 80, 100, 200, 300, 400, 500, or 600 amino acids in length having at least 80%, 85%, 90%, 95%, 96%, 97%, 98%, or 99% sequence identity to a wild-type paramyxovirus fusogen, e.g., a sequence of Table 4 or Table 5, optionally wherein the wild-type paramyxovirus fusogen has a sequence of amino acids set forth in any one of SEQ ID NOS: 1-132, and
[0136] b) a retroviral nucleic acid encoding an exogenous agent (e.g., exogenous polypeptide or exogenous RNA); and
[0137] c) MHC I (e.g., HLA-A, HAL-B, or HLA-C) or MHC II (e.g., HLA-DP, HLA-DM, HLA-DOA, HLA-DOB, HLA-DQ, or HLA-DR) that is absent or present at reduced levels (e.g., reduced by at least 10%, 20%, 30%, 40%, 50%, 60%, 70%, 80%, or 90%) compared to a retrovirus-like particle or retroviral vector generated from an otherwise similar, unmodified source cell.
   202. A pseudotyped retrovirus-like particle or retroviral vector (e.g., a particle or vector suitable for in vivo use in a human subject), comprising:
   a) a pseudotyped envelope comprising a fusogen, wherein the fusogen comprises a domain of at least 40, 50, 60, 80, 100, 200, 300, 400, 500, or 600 amino acids in length having at least 80%, 85%, 90%, 95%, 96%, 97%, 98%, or 99% sequence identity to a wild-type paramyxovirus fusogen, e.g., a sequence of Table 4 or Table 5, optionally wherein the wild-type paramyxovirus fusogen has a sequence of amino acids set forth in any one of SEQ ID NOS: 1-132; and
   b) a retroviral nucleic acid encoding an exogenous agent (e.g., exogenous polypeptide or exogenous RNA); and
   c) one or both of an exogenous or overexpressed immunosuppressive protein or an immunostimulatory protein that is absent or present at reduced levels (e.g., reduced by at least 10%, 20%, 30%, 40%, 50%, 60%, 70%, 80%, or 90%) compared to a retrovirus-like particle or retroviral vector generated from an otherwise similar, unmodified source cell.
   203. The retrovirus-like particle or retroviral vector of any of the preceding embodiments, wherein the retrovirus-like particle or retroviral vector is in circulation at least 0.5, 1, 2, 3, 4, 6, 12, 18, 24, 36, or 48 hours after administration to the subject.
   204. The retrovirus-like particle or retroviral vector of any of the preceding embodiments, wherein at least 0.001%, 0.01%, 0.1%, 1%, 10%, 20%, 30%, 40%, 50%, 60%, 70%, 80%, 90%, or 100% of retroviruses are in circulation 30 minutes after administration.
   205. The retrovirus-like particle or retroviral vector of any of the preceding embodiments, wherein at least 0.001%, 0.01%, 0.1%, 1%, 10%, 20%, 30%, 40%, 50%, 60%, 70%, 80%, 90%, or 100% of retroviruses are in circulation 1 hour after administration.
   206. The retrovirus-like particle or retroviral vector of any of the preceding embodiments, wherein at least 0.001%, 0.01%, 0.1%, I %, 10%, 20%, 30%, 40%, 50%, 60%, 70%, 80%, 90%, or 100% of retroviruses are in circulation 2 hours after administration.
   207. The retrovirus-like particle or retroviral vector of any of the preceding embodiments, wherein at least embodiments 0.001%, 0.01%, 0.1%, 1%, 10%, 20%, 30%, 40%, 50%, 60%, 70%, 80%, 90%, or 100% of retroviruses are in circulation 4 hours after administration.
   208. The retrovirus-like particle or retroviral vector of any of the preceding embodiments, wherein at least 0.001%, 0.01%, 0.1%, 1%, 10%, 20%, 30%, 40%, 50%, 60%, 70%, 80%, 90%, or 100% of retroviruses are in circulation 8 hours after administration.
   209. The retrovirus-like particle or retroviral vector of any of the preceding embodiments, wherein at least 0.001%, 0.01%, 0.1%, 1%, 10%, 20%, 30%, 40%, 50%, 60%, 70%, 80%, 90%, or 100% of retroviruses are in circulation 12 hours after administration.
   210. The retrovirus-like particle or retroviral vector of any of the preceding embodiments, wherein at least 0.001%, 0.01%, 0.1%, 1%, 10%, 20%, 30%, 40%, 50%, 60%, 70%, 80%, 90%, or 100% of retroviruses are in circulation 18 hours after administration.
   211. The retrovirus-like particle or retroviral vector of any of the preceding embodiments, wherein at least 0.001%, 0.01%, 0.1%, 1%, 10%, 20%, 30%, 40%, 50%, 60%, 70%, 80%, 90%, or 100% of retroviruses are in circulation 24 hours after administration.
   212. The retrovirus-like particle or retroviral vector of any of the preceding embodiments, wherein at least 0.001%, 0.01%, 0.1%, 1%, 10%, 20%, 30%, 40%, 50%, 60%, 70%, 80%, 90%, or 100% of retroviruses are in circulation 36 hours after administration.
   213. The retrovirus-like particle or retroviral vector of any of the preceding embodiments, wherein at least 0.001%, 0.01%, 0.1%, 1%, 10%, 20%, 30%, 40%, 50%, 60%, 70%, 80%, 90%, or 100% of retroviruses are in circulation 48 hours after administration.
   214. The retrovirus-like particle or retroviral vector of any of the preceding embodiments, which has a reduction in immunogenicity as measured by a reduction in humoral response following one or more administration of the retrovirus to an appropriate animal model, e.g., an animal model described herein, compared to reference retrovirus, e.g., an unmodified retrovirus otherwise similar to the retrovirus.
   215. The retrovirus-like particle or retroviral vector of any of the preceding embodiments, wherein the reduction in humoral response is measured in a serum sample by an anti-cell antibody titre, e.g., anti-retroviral antibody titre, e.g., by ELISA.
   216. The retrovirus-like particle or retroviral vector of any of the preceding embodiments, wherein a serum sample from animals administered the retrovirus composition has a reduction of 1%, 5%, 10%, 20%, 30%, 40%, 50%, 60%, 70%, 80%, 90%, or more of an anti-retrovirus antibody titer compared to the serum sample from a subject administered an unmodified cell.
   217. The retrovirus-like particle or retroviral vector of any of the preceding embodiments, wherein a serum sample from a subject administered the retorivirus composition has an increased anti-cell antibody titre, e.g., increased by 1%, 2%, 5%, 10%, 20%, 30%, or 40% from baseline, e.g., wherein baseline refers to serum sample from the same subject before administration of the retrovirus composition.
   218. The retrovirus-like particle or retroviral vector of any of the preceding embodiments, wherein: the subject to be administered the retrovirus or pharmaceutical composition has, or is known to have, or is tested for, a pre-existing antibody (e.g., IgG or IgM) reactive with the retrovirus; the subject to be administered the retrovirus composition does not have detectable levels of a pre-existing antibody reactive with the retrovirus; a subject that has received the retrovirus or pharmaceutical composition has, or is known to have, or is tested for, an antibody (e.g., IgG or IgM) reactive with the retrovirus; the subject that received the retrovirus or pharmaceutical composition (e.g., at least once, twice, three times, four times, five times, or more) does not have detectable levels of antibody reactive with the retrovirus; or levels of antibody do not rise more than 1%, 2%, 5%, 10%, 20%, or 50% between two timepoints, the first timepoint being before the first administration of the retrovirus, and the second timepoint being after one or more administrations of the retorivirus.
   219. The retrovirus-like particle or retroviral vector of any of the preceding embodiments, wherein the retroviral vector is produced by the methods of Example 5, 6, or 7, e.g., from cells transfected with HLA-G or HLA-E cDNA.
   220. The retrovirus-like particle or retroviral vector of any of the preceding embodiments, wherein retroviral vectors generated from NMC-HLA-G cells have a decreased percentage of lysis, e.g., PBMC mediated lysis, NK cell mediated lysis, and/or CDS+ T cell mediated lysis, at specific timepoints as compared to retroviral vectors generated from NMCs or NMC-empty vector.
   221. The retrovirus-like particle or retroviral vector of any of the preceding embodiments, wherein the modified retroviral vector evades phagocytosis by macrophages.
   222. The retrovirus-like particle or retroviral vector of any of the preceding embodiments, wherein the retroviral vector is produced by the methods of Example 8, e.g., from cells transfected with CD47 cDNA.
   223. The retrovirus-like particle or retroviral vector of any of the preceding embodiments, wherein the phagocytic index is reduced when macrophages are incubated with retroviral vectors derived from NMC-CD47, versus those derived from NMC, or NMC-empty vector.
   224. The retrovirus-like particle or retroviral vector of any of the preceding embodiments, which has a reduction in macrophage phagocytosis, e.g., a reduction of 1%, 5%, 10%, 20%, 30%, 40%, 50%, 60%, 70%, 80%, 90%, or more in macrophage phagocytosis compared to a reference retrovirus, e.g., an unmodified retrovirus otherwise similar to the retrovirus, wherein the reduction in macrophage phagocytosis is determined by assaying the phagocytosis index in vitro, e.g., as described in Example 8.
   225. The retrovirus-like particle or retroviral vector of any of the preceding embodiments, wherein the retrovirus composition has a phagocytosis index of 0, 1, 10, 100, or more, e.g., as measured by an assay of Example 8, when incubated with macrophages in an in vitro assay of macrophage phagocytosis.
   226. The retrovirus-like particle or retroviral vector of any of the preceding embodiments, which is modified and has reduced complement activity compared to an unmodified retroviral vector.
   227. The retrovirus-like particle or retroviral vector of any of the preceding embodiments, which is produced by the methods of Example 9, e.g., from cells transfected with a cDNA coding for complement regulatory proteins, e.g., DAF.
   228. The retrovirus-like particle or retroviral vector of any of the preceding embodiments, wherein the dose of retroviral vector at which 200 μg/ml of C3a is present is greater for the modified retroviral vector (e.g., HEK293-DAF) incubated with corresponding mouse sera (e.g., HEK-293 DAF mouse sera) than for the reference retroviral vector (e.g., HEK293 retroviral vector) incubated with corresponding mouse sera (e.g., HEK293 mouse sera).
   229. The retrovirus-like particle or retroviral vector of any of the preceding embodiments, wherein the dose of retroviral vector at which 200 μg/ml of C3a is present is greater for for the modified retroviral vector (e.g., HEK293-DAF) incubated with naive mouse sera than for the reference retroviral vector (e.g., HEK293 retroviral vector) incubated with naive mouse sera.
   230. The retrovirus-like particle or retroviral vector of any of the preceding embodiments, wherein the retrovirus composition is resistant to complement mediated inactivation in patient serum 30 minutes after administration according to an assay of Example 9.
   231. The retrovirus-like particle or retroviral vector of any of the preceding embodiments wherein at least 0.001%, 0.01%, 0.1%, 1%, 10%, 20%, 30%, 40%, 50%, 60%, 70%, 80%, 90%, or 100% of retroviruses are resistant to complement mediated inactivation.
   232. The retrovirus-like particle or retroviral vector of any of the preceding embodiments, wherein the complement regulatory protein comprises one or more of proteins that bind decay-accelerating factor (DAF, CD55), e.g. factor H (FH)-like protein-I (FHL-1), e.g. C4b-binding protein (C4BP), e.g. complement receptor I (CD35), e.g. Membrane cofactor protein (MCP, CD46), eg. Protectin (CD59), e.g. proteins that inhibit the classical and alternative complement pathway CD/C5 convertase enzymes, e.g. proteins that regulate MAC assembly.
   233. The retrovirus-like particle or retroviral vector of any of the preceding embodiments, which is produced by the methods of Example 10, e.g., from cells transfected with a DNA coding for an shRNA targeting MHC class I, e.g., wherein retroviral vectors derived from NMC-shMHC class I has lower expression of MHC class I compared to NMCs and NMC-vector control.
   234. The retrovirus-like particle or retroviral vector of any of the preceding embodiments, wherein a measure of immunogenicity for retroviral vectors is serum inactivation, e.g., serum inactivation measured as described herein, e.g., as described in Example 11.
   235. The retrovirus-like particle or retroviral vector of any of the preceding embodiments, wherein the percent of cells which receive the exogenous agent is not different between retroviral vector samples that have been incubated with serum and heat-inactivated serum from retroviral vector naive mice.
   236. The retrovirus-like particle or retroviral vector of any of the preceding embodiments, wherein the percent of cells which receive the exogenous agent is not different between retroviral vector samples that have been incubated with serum from retroviral vector nai:ve mice and no-serum control incubations.
   237. The retrovirus-like particle or retroviral vector of any of the preceding embodiments wherein the percent of cells which receive the exogenous agent is less in retroviral vector samples that have been incubated with positive control serum than in retroviral vector samples that have been incubated with serum from retroviral vector naive mice.
   238. The retrovirus-like particle or retroviral vector of any of the preceding embodiments, wherein a modified retroviral vector, e.g., modified by a method described herein, has a reduced (e.g., reduced compared to administration of an unmodified retroviral vector) serum inactivation following multiple (e.g., more than one, e.g., 2 or more), administrations of the modified retroviral vector.
   239. The retrovirus-like particle or retroviral vector of any of the preceding embodiments, wherein a retroviral vector described herein is not inactivated by serum following multiple administrations.
   240. The retrovirus-like particle or retroviral vector of any of the preceding embodiments, wherein a measure of immunogenicity for retroviral vector is serum inactivation, e.g., after multiple administrations, e.g., serum inactivation after multiple administrations measured as described herein, e.g., as described in Example 12.
   241. The retrovirus-like particle or retroviral vector of any of the preceding embodiments, wherein the percent of cells which receive the exogenous agent is not different between retroviral vector samples that have been incubated with serum and heat-inactivated serum from mice treated with modified (e.g., HEK293-HLA-G) retroviral vectors.
   242. The retrovirus-like particle or retroviral vector of any of the preceding embodiments, wherein the percent of cells which receive the exogenous agent is not different between retroviral vector samples that have been incubated from mice treated 1, 2, 3, 5 or 10 times with modified (e.g., HEK293-HLA-G) retroviral vectors.
   243. The retrovirus-like particle or retroviral vector of any of the preceding embodiments, wherein the percent of cells which receive the exogenous agent is not different between retroviral vector samples that have been incubated with serum from mice treated with vehicle and from mice treated with modified (e.g., HEK293-HLA-G) retroviral vectors.
   244. The retrovirus-like particle or retroviral vector of any of the preceding embodiments, wherein the percent of cells which receive the exogenous agent is less for retroviral vectors derived from a reference cell (e.g., HEK293) than for modified (e.g., HEK293-HLA-G) retroviral vectors.
   245. The retrovirus-like particle or retroviral vector of any of the preceding embodiments, wherein a measure of immunogenicity for a retroviral vector is antibody responses.
   246. The retrovirus-like particle or retroviral vector of any of the preceding embodiments, wherein a subject that receives a retroviral vector described herein has pre-existing antibodies which bind to and recognize retroviral vector, e.g., measured as described herein, e.g., as described in Example 13.
   247. The retrovirus-like particle or retroviral vector of any of the preceding embodiments, wherein serum from retroviral vector-nai:ve mice shows more signal (e.g., fluorescence) than the negative control, e.g., serum from a mouse depleted of IgM and IgG, e.g., indicating that in immunogenicity has occurred.
   248. The retrovirus-like particle or retroviral vector of any of the preceding embodiments, wherein serum from retroviral vector-nai:ve mice shows similar signal (e.g., fluorescence) compared to the negative control, e.g., indicating that immunogenicity did not detectably occur.
   249. The retrovirus-like particle or retroviral vector of any of the preceding embodiments, which is a modified retroviral vector, e.g., modified by a method described herein, and which has a reduced (e.g., reduced compared to administration of an unmodified retroviral vector) humoral response following multiple (e.g., more than one, e.g., 2 or more), administrations of the modified retroviral vector e.g., measured as described herein, e.g., as described in Example 14.
   250. The retrovirus-like particle or retroviral vector of any of the preceding embodiments, wherein the retroviral vector is produced by the methods of Example 5, 6, 7, or 14, e.g., from cells transfected with HLA-G or HLA-E cDNA.
   251. The retrovirus-like particle or retroviral vector of any of the preceding embodiments, wherein humoral response is assessed by determining a value for the level of anti-retroviral vector antibodies (e.g., IgM, IgG1, and/or IgG2 antibodies).
   252. The retrovirus-like particle or retroviral vector of any of the preceding embodiments, wherein modified (e.g., NMC-HLA-G) retroviral vectors have decreased anti-viral IgM or IgG1/2 antibody titers (e.g., as measured by fluorescence intensity on FACS) after injections, as compared to a control, e.g., NMC retroviral vectors or NMC-empty retroviral vectors.
   253. The retrovirus-like particle or retroviral vector of any of the preceding embodiments, wherein recipient cells are not targeted by an antibody response, or an antibody response will be below a reference level, e.g., measured as described herein, e.g., as described in Example 15.
   254. The retrovirus-like particle or retroviral vector of any of the preceding embodiments, signal (e.g., mean fluorescence intensity) is similar for recipient cells from mice treated with retroviral vectors and mice treated with PBS.
   255. The retrovirus-like particle or retroviral vector of any of the preceding embodiments, wherein a measure of the immunogenicity of recipient cells is the macrophage response.
   256. The retrovirus-like particle or retroviral vector of any of the preceding embodiments, wherein recipient cells are not targeted by macrophages, or are targeted below a reference level.
   257. The retrovirus-like particle or retroviral vector of any of the preceding embodiments, wherein the phagocytic index, e.g., measured as described herein, e.g., as described in Example 16, is similar for recipient cells derived from mice treated with retroviral vectors and mice treated with PBS.
   258. The retrovirus-like particle or retroviral vector of any of the preceding embodiments, wherein a measure of the immunogenicity of recipient cells is the PBMC response.
   259. The retrovirus-like particle or retroviral vector of any of the preceding embodiments, wherein recipient cells do not elicit a PBMC response.
   260. The retrovirus-like particle or retroviral vector of any of the preceding embodiments, wherein the percent of CD3+/CMG+ cells is similar for recipient cells derived from mice treated with retroviral vector and mice treated with PBS, e.g., as measured as described herein, e.g., as described in Example 17.
   261. The retrovirus-like particle or retroviral vector of any of the preceding embodiments, wherein a measure of the immunogenicity of recipient cells is the natural killer cell response.
   262. The retrovirus-like particle or retroviral vector of any of the preceding embodiments, wherein recipient cells do not elicit a natural killer cell response or elicit a lower natural killer cell response, e.g., lower than a reference value.
   263. The retrovirus-like particle or retroviral vector of any of the preceding embodiments, wherein the percent of CD3+/CMG+ cells is similar for recipient cells derived from mice treated with retroviral vector and mice treated with PBS, e.g., as measured as described herein, e.g., as described in Example 18.
   264. The retrovirus-like particle or retroviral vector of any of the preceding embodiments, wherein a measure of the immunogenicity of recipient cells is the CDS+ T cell response.
   265. The retrovirus-like particle or retroviral vector of any of the preceding embodiments wherein recipient cells do not elicit a CDS+ T cell response or elicit a lower CDS+ T cell response, e.g., lower than a reference value.
   266. The retrovirus-like particle or retroviral vector of any of the preceding embodiments, wherein the percent of CD3+/CMG+ cells is similar for recipient cells derived from mice treated with retroviral vector and mice treated with PBS, e.g., as measured as described herein, e.g., as described in Example 19.
   267. The retrovirus-like particle or retroviral vector of any of the preceding embodiments, wherein the fusogen is a re-targeted fusogen.
   268. The retrovirus-like particle or retroviral vector of any of the preceding embodiments, which comprises a retroviral nucleic acid that encodes one or both of: (i) a positive target cell-specific regulatory element operatively linked to a nucleic acid encoding an exogenous agent, or (ii) a negative target cell-specific regulatory element operatively linked to the nucleic acid encoding the exogenous agent.
   269. A pseudotyped retrovirus-like particle or retroviral vector (e.g., a particle or vector suitable for in vivo use in a human subject), comprising:
[0138] a) a pseudotyped envelope comprising a fusogen, wherein the fusogen comprises a domain of at least 40, 50, 60, 80, 100, 200, 300, 400, 500, or 600 amino acids in length having at least 80%, 85%, 90%, 95%, 96%, 97%, 98%, or 99% sequence identity to a wild-type paramyxovirus fusogen, e.g., a sequence of Table 4 or Table 5, optionally wherein the wild-type paramyxovirus fusogen has a sequence of amino acids set forth in any one of SEQ ID NOS: 1-132; and
[0139] b) a retroviral nucleic acid encoding an exogenous agent (e.g., exogenous polypeptide or exogenous RNA), wherein the retroviral nucleic acid comprises one or more insulator elements.
   270. The pseudotyped retrovirus-like particle or retroviral vector of embodiment 269, wherein the retroviral nucleic acid comprises two insulator elements, e.g., a first insulator element upstream of a region encoding the exogenous agent and a second insulator element downstream of a region encoding the exogenous agent, e.g., wherein the first insulator element and second insulator element comprise the same or different sequences.
   271. The pseudotyped retrovirus-like particle or retroviral vector of embodiment 269 or 270, wherein variation in the median exogenous agent level in a sample of cells isolated after administration of the particle or vector to the subject at a first timepoint is at least, less than, or about 10,000%, 5,000%, 2,000%, 1,000%, 500%, 200%, 100%, 50%, 20%, 10%, or 5% of the median exogenous agent level in a sample of cells isolated after administration of the particle or vector to the subject at a second, later timepoint.
   272. The pseudotyped retrovirus-like particle or retroviral vector of embodiment 271, wherein the median expression level per cell is assessed only in cells that have a retroviral genome copy number of at least 1.0.
   273. The pseudotyped retrovirus-like particle or retroviral vector of any of embodiments 269-272, wherein at least 10%, 20%, 30%, 40%, 50%, 60%, 70%, 80%, or 90% of target cells in the subject detectably comprise the exogenous agent.
   274. The pseudotyped retrovirus-like particle or retroviral vector of any of embodiments 271-273, wherein the median payload gene expression level is assessed across cells isolated from the subject 7 days, 14 days, 28 days, 56 days, 112 days, 365 days, 730 days, 1095 days after administration of the retroviral composition to the subject.
   275. The pseudotyped retrovirus like particle or retroviral vector of any of embodiments 269-274, wherein at least 10%, 20%, 30%, 40%, 50%, 60%, 70%, 80%, or 90% of target cells in the subject that detectably comprised the exogenous agent at a first time point still detectably comprise the exogenous agent at a second, later timepoint, e.g., wherein the first time point is 7 days, 14 days, 28 days, 56 days, 112 days, 365 days, 730 days, 1095 days after administration of the retroviral composition to the subject.
   276. The pseudotyped retrovirus like particle or retroviral vector of embodiment 275, wherein the second time point is 7 days, 14 days, 28 days, 56 days, 112 days, 365 days, 730 days, 1095 days after the first time point.
   277. The pseudotyped retrovirus like particle or retroviral vector of any of embodiments 269-276, which is not genotoxic or does not increase the rate of tumor formation in target cells compared to target cells not treated with the retrovirus like particle or retroviral vector.
   278. The pseudotyped retrovirus like particle or retroviral vector of any of embodiments 269-277, wherein the median exogenous agent level is assessed in a population of cells from a subject that has received the retroviral vector or pharmaceutical composition.
   279. The pseudotyped retrovirus like particle or retroviral vector of any of embodiments 269-278, wherein the median exogenous agent level assessed in populations of cells collected (e.g., isolated) from the subject at different days post administration is less than about 10,000% 1000%, 100%, or 10%, e.g., 10,000%-1000%, 1000%-100%, or 100%-10% different from the median exogenous agent level in the population of cells assessed at day 7, day 14, day 28, or day 56, wherein the cells in the population have a vector copy number of at least 1.0.
   280. The pseudotyped retrovirus like particle or retroviral vector of any of embodiments 269-279, wherein exogenous agent level is assessed across cells from a subject that has received the retroviral vector or pharmaceutical composition.
   281. The pseudotyped retrovirus like particle or retroviral vector of any of embodiments 269-280, wherein the percent of cells comprising the exogenous agent is assessed in a plurality of cells collected (e.g., isolated) from the subject 7 days, 14 days, 28 days, 56 days, 112 days, 365 days, 730 days, 1095 days after administration of the retroviral vector or pharmaceutical composition.
   282. The pseudotyped retrovirus like particle or retroviral vector of any of embodiments 269-281, wherein the difference in the percent of cells comprising the exogenous agent assessed in cells isolated at two different days post administration is less than I %, 5%, 10%, 20%, 50%, 75%, 100%, 150%, 200%, 250%, 300%, 400%, 500%, 750%, 1000%, 1500%, or 2000%.
   283. The pseudotyped retrovirus like particle or retroviral vector of any of embodiments 269-282, wherein the percent of target cells that are positive for the exogenous agent is similar across cells collected at 7 days, 14 days, 28 days, 56 days, 112 days, 365 days, 730 days, or 1095 days.
   284. The pseudotyped retrovirus like particle or retroviral vector of any of embodiments 269-283, wherein: at least as many target cells are positive for the exogenous agent 14 days, 28 days, 56 days, 112 days, 365 days, 730 days, or 1095 days as at 7 days; at least as many target cells are positive for the exogenous agent at 28 days, 56 days, 112 days, 365 days, 730 days, or 1095 days as at 14 days; at least as many target cells are positive for the exogenous agent at 56 days, 112 days, 365 days, 730 days, or 1095 days as at 28 days; at least as many target cells are positive for the exogenous agent at 112 days, 365 days, 730 days, or 1095 days as at 56 days; at least as many target cells are positive for the exogenous agent at 365 days, 730 days, or 1095 days as at 112 days; at least as many target cells are positive for the exogenous agent at 730 days or 1095 days as at 365 days; or at least as many target cells are positive for the exogenous agent at 1095 days as at 730 days.
   285. The pseudotyped retrovirus like particle or retroviral vector of any of embodiments 269-284, wherein: the median exogenous agent level in target cells that comprise the exogenous agent is similar in cells collected at 7 days, 14 days, 28 days, 56 days, 112 days, 365 days, 730 days, or 1095 days; the median exogenous agent level in target cells that comprise the exogenous agent at 14 days, 28 days, 56 days, 112 days, 365 days, 730 days, or 1095 days is at least as high as at 7 days; the median exogenous agent level in target cells that comprise the exogenous agent at 28 days, 56 days, 112 days, 365 days, 730 days, or 1095 days is at least as high as at 14 days; the median exogenous agent level in target cells that comprise the exogenous agent at 56 days, 112 days, 365 days, 730 days, or 1095 days is at least as high as at 28 days; the median exogenous agent level in target cells that comprise the exogenous agent at 112 days, 365 days, 730 days, or 1095 days is at least as high as at 56 days; the median exogenous agent level in target cells that comprise the exogenous agent at 365 days, 730 days, or 1095 days is at least as high as at 112 days; the median exogenous agent level in target cells that comprise the exogenous agent at 730 days, or 1095 days is at least as high as at 365 days; or the median exogenous agent level in target cells that comprise the exogenous agent at 1095 days is at least as high as at 730 days.
   286. A method of delivering an exogenous agent to a subject (e.g., a human subject) comprising administering to the subject a retrovirus-like particle (e.g., a pseudotyped retrovirus-like particle) or retroviral vector (e.g., pseudotyped retroviral vector) of any of the preceding embodiments, thereby delivering the exogenous agent to the subject.
   287. A method of modulating a function, in a subject (e.g., a human subject), target tissue or target cell, comprising contacting, e.g., administering to, the subject, the target tissue or the target cell with a retrovirus-like particle (e.g., a pseudotyped retrovirus-like particle) or retroviral vector (e.g., pseudotyped retroviral vector) of any of the preceding embodiments.
   288. The method of embodiment 287, wherein the target tissue or the target cell is present in a subject.
   289. A method of treating or preventing a disorder, e.g., a cancer, in a subject (e.g., a human subject) comprising administering to the subject a retrovirus-like particle (e.g., a pseudotyped retrovirus-like particle) or retroviral vector (e.g., pseudotyped retroviral vector) of any of the preceding embodiments.
   290. A method of making a retroviral vector or retrovirus-like particle of any of the preceding embodiments, comprising:
[0140] a) providing a source cell that comprises the retroviral nucleic acid and the fusogen (e.g., re-targeted fusogen);
[0141] b) culturing the source cell under conditions that allow for production of the retroviral vector, and
[0142] c) separating, enriching, or purifying the retroviral vector from the source cell, thereby making the retroviral vector.
   291. A source cell for producing a retroviral vector, comprising:
[0143] a) a retroviral nucleic acid;
[0144] b) viral structural proteins that can package the retroviral nucleic acid, wherein at least one viral structural protein comprises a fusogen that binds a fusogen receptor; and
[0145] c) a fusogen receptor that is absent or present at reduced levels (e.g., reduced by at least 10%, 20%, 30%, 40%, 50%, 60%, 70%, 80%, or 90%) compared to an otherwise similar, unmodified source cell.
   292. The source cell of embodiment 291, wherein the fusogen causes fusion of the retroviral vector with the target cell upon binding to the fusogen receptor.
   293. The source cell of embodiment 291 or 292, which binds to the second similar source cell, e.g., the fusogen of the source cell binds to the fusogen receptor on the second source cell.
   294. A population of source cells of any of embodiments 291-293.
   295. The population of source cells of embodiment 294, wherein less than 10%, 5%, 4%, 3%, 2%, or 1% of cells in the population are multinucleated.
   296. The source cell or population of source cells of any of embodiments 291-295, wherein a source cell is modified to have reduced fusion (e.g., to not fuse) with other source cells during manufacturing of a retroviruse described herein.
   297. The source cell or population of source cells of any of embodiments 291-296, wherein the fusogen (e.g., re-targeted fusogen) does not bind to a protein comprised by a source cell, e.g., to a protein on the surface of the source cell.
   298. The source cell or population of source cells of any of embodiments 291-297, wherein the fusogen (e.g., re-targeted fusogen) binds to a protein comprised by a source cell, but does not fuse with the cell.
   299. The source cell or population of source cells of any of embodiments 291-298, wherein the fusogen does not induce fusion with a source cell.
   300. The source cell or population of source cells of any of embodiments 291-299, wherein the source cell does not express a protein, e.g., an antigen, that binds the fusogen.
   301. The source cell or population of source cells of any of embodiments 291-300, a plurality of source cells do not form a syncytium when expressing the fusogen, or less than 50%, 40%, 30%, 20%, 10%, 5%, 4%, 3%, 2%, or I % of cells in the population are multinucleated (e.g., comprise two or more nuclei).
   302. The source cell or population of source cells of any of embodiments 291-301, wherein a plurality of source cells do not form a syncytium when producing lentivirus, or less than 50%, 40%, 30%, 20%, 10%, 5%, 4%, 3%, 2%, or I % of cells in the population are multinucleated.
   303. The source cell or population of source cells of any of embodiments 291-302, wherein less than 50%, 40%, 30%, 20%, 10%, 5%, 4%, 3%, 2%, or I % of the nuclei in the population are in syncytia.
   304. The source cell or population of source cells of any of embodiments 291-303, wherein at least 50%, 60%, 70%, 80%, 90%, 95%, 96%, 97%, 98%, 99% of nuclei in the population are in uninuclear cells.
   305. The source cell or population of source cells of any of embodiments 291-304, wherein the percentage of cells that are multinucleated is lower in a population of the modified source cells compared to an otherwise similar population of unmodified source cell, e.g., lower by at least 10%, 20%, 30%, 40%, 50%, 60%, 70%, 80%, 90%, 95%, 96%, 97%, 98%, or 99%.
   306. The source cell or population of source cells of any of embodiments 291-305, wherein the percent of nuclei present in syncytia is lower in a population of the modified source cells compared to an otherwise similar population of unmodified source cell, e.g., lower by at least 10%, 20%, 30%, 40%, 50%, 60%, 70%, 80%, 90%, 95%, 96%, 97%, 98%, or 99%.
   307. The source cell or population of source cells of any of embodiments 291-306, wherein multinucleated cells (e.g., cells having two or more nuclei) are detected by a microscopy assay, e.g., using a DNA stain, e.g., an assay of Example 20.
   308. The source cell or population of source cells of any of embodiments 291-307, wherein the functional viral particles obtained from the modified source cells is at least 10%, 20%, 40%, 40%, 50%, 60%, 70%, 80%, 90%, 2-fold, 5-fold, or 10-fold greater than the number of functional viral particles obtained from otherwise similar unmodified source cells, e.g., using an assay of Example 20.
   309. A retroviral vector or retrovirus like particle that lacks a fusogen receptor or comprises a fusogen receptor that is present at reduced levels (e.g., reduced by at least 10%, 20%, 30%, 40%, 50%, 60%, 70%, 80%, or 90%) compared to an unmodified retroviral vector or retrovirus like particle from an otherwise similar source cell.
   310. A method of making a retroviral vector or retrovirus like particle, comprising:
[0146] a) providing a source cell that comprises a fusogen (e.g., re-targeted fusogen), wherein the source cell lacks a fusogen receptor or comprises a fusogen receptor that is present at reduced levels (e.g., reduced by at least 10%, 20%, 30%, 40%, 50%, 60%, 70%, 80%, or 90%) compared to an otherwise similar, unmodified source cell;
[0147] b) culturing the source cell under conditions that allow for production of the retroviral vector, and
[0148] c) separating, enriching, or purifying the retroviral vector from the source cell, thereby making the retroviral vector.
   311. The method of embodiment 310, wherein providing the source cell comprises knocking down or knocking out the fusogen receptor in the source cell or a precursor thereof.

[0149] Other features, objects, and advantages of the invention will be apparent from the description and drawings, and from the claims.

[0150] Unless otherwise defined, all technical and scientific terms used herein have the same meaning as commonly understood by one of ordinary skill in the art to which this invention belongs. All publications, patent applications, patents, and other references mentioned herein are incorporated by reference in their entirety. For example, all GenBank, Unigene, and Entrez sequences referred to herein, e.g., in any Table herein, are incorporated by reference. Unless otherwise specified, the sequence accession numbers specified herein, including in any Table herein, refer to the database entries current as of May 15, 2018. When one gene or protein references a plurality of sequence accession numbers, all of the sequence variants are encompassed. In addition, the materials, methods, and examples are illustrative only and not intended to be limiting.

### DETAILED DESCRIPTION

[0151] The present disclosure provides, at least in part, fusosome methods and compositions for in vivo delivery. In some embodiments, the fusosome comprises a combination of elements that promote specificity for target cells, e.g., one or more of a re-targeted fusogen, a positive target cell-specific regulatory element, and a non-target cell-specific regulatory element. In some embodiments, the fusosome comprises one or more modifications that decrease an immune response against the fusosome.

### Definitions

[0152] Terms used in the claims and specification are defined as set forth below unless otherwise specified.

[0153] As used herein, “detectably present”, when used in the context of an exogenous agent being detectably present, means that the exogenous agent itself is detectably present. For instance, if the exogenous agent is a protein, the exogenous protein agent can be detectably present regardless of whether a nucleic acid that encodes it is detectably present or not.

[0154] As used herein, “fusosome” refers to a bilayer of amphipathic lipids enclosing a lumen or cavity and a fusogen that interacts with the amphipathic lipid bilayer. In embodiments, the fusosome comprises a nucleic acid. In some embodiments, the fusosome is a membrane enclosed preparation. In some embodiments, the fusosome is derived from a source cell.

[0155] As used herein, “fusosome composition” refers to a composition comprising one or more fusosomes.

[0156] As used herein, “fusogen” refers to an agent or molecule that creates an interaction between two membrane enclosed lumens. In embodiments, the fusogen facilitates fusion of the membranes. In other embodiments, the fusogen creates a connection, e.g., a pore, between two lumens (e.g., a lumen of a retroviral vector and a cytoplasm of a target cell). In some embodiments, the fusogen comprises a complex of two or more proteins, e.g., wherein neither protein has fusogenic activity alone. In some embodiments, the fusogen comprises a targeting domain.

[0157] As used herein, a “fusogen receptor” refers to an entity (e.g., a protein) comprised by a target cell, wherein binding of a fusogen on a fusosome (e.g., retrovirus) to a fusogen receptor on a target cell promotes delivery of a nucleic acid (e.g., retroviral nucleic acid) (and optionally also an exogenous agent encoded therein) to the target cell.

[0158] As used herein, an “insulator element” refers to a nucleotide sequence that blocks enhancers or prevents heterochromatin spreading. An insulator element can be wild-type or mutant.

[0159] The term “effective amount” as used herein means an amount of a pharmaceutical composition which is sufficient enough to significantly and positively modify the symptoms and/or conditions to be treated (e.g., provide a positive clinical response). The effective amount of an active ingredient for use in a pharmaceutical composition will vary with the particular condition being treated, the severity of the condition, the duration of treatment, the nature of concurrent therapy, the particular active ingredient(s) being employed, the particular pharmaceutically-acceptable excipient(s) and/or carrier(s) utilized, and like factors with the knowledge and expertise of the attending physician.

[0160] An “exogenous agent” as used herein with reference to a virus, VLP, or fusosome, refers to an agent that is neither comprised by nor encoded in the corresponding wild-type virus or fusogen made from a corresponding wild-type source cell. In some embodiments, the exogenous agent does not naturally exist, such as a protein or nucleic acid that has a sequence that is altered (e.g., by insertion, deletion, or substitution) relative to a naturally occurring protein. In some embodiments, the exogenous agent does not naturally exist in the source cell. In some embodiments, the exogenous agent exists naturally in the source cell but is exogenous to the virus. In some embodiments, the exogenous agent does not naturally exist in the recipient cell. In some embodiments, the exogenous agent exists naturally in the recipient cell, but is not present at a desired level or at a desired time. In some embodiments, the exogenous agent comprises RNA or protein.

[0161] The term “pharmaceutically acceptable” as used herein, refers to excipients, compositions and/or dosage forms which are, within the scope of sound medical judgment, suitable for use in contact with the tissues of human beings and animals without excessive toxicity, irritation, allergic response, or other problem or complication, commensurate with a reasonable benefit/risk ratio.

[0162] As used herein, a “positive target cell-specific regulatory element” (or positive TCSRE) refers to a nucleic acid sequence that increases the level of an exogenous agent in a target cell compared to in a non-target cell, wherein the nucleic acid encoding the exogenous agent is operably linked to the positive TCSRE. In some embodiments, the positive TCSRE is a functional nucleic acid sequence, e.g., the positive TCSRE can comprise a promoter or enhancer.

[0163] In some embodiments, the positive TCSRE encodes a functional RNA sequence, e.g., the positive TCSRE can encode a splice site that promotes correct splicing of the RNA in the target cell. In some embodiments, the positive TCSRE encodes a functional protein sequence, or the positive TCSRE can encode a protein sequence that promotes correct post-translational modification of the protein. In some embodiments, the positive TCSRE decreases the level or activity of a downregulator or inhibitor of the exogenous agent.

[0164] As used herein, a “negative target cell-specific regulatory element” (or negative TCSRE) refers to a nucleic acid sequence that decreases the level of an exogenous agent in a non-target cell compared to in a target cell, wherein the nucleic acid encoding the exogenous agent is operably linked to the negative TCSRE. In some embodiments, the negative TCSRE is a functional nucleic acid sequence, e.g., a miRNA recognition site that causes degradation or inhibition of the retroviral nucleic acid in a non-target cell. In some embodiments, the nucleic acid sequence encodes a functional RNA sequence, e.g., the nucleic acid encodes an miRNA sequence present in an mRNA encoding an exogenous protein agent, such that the mRNA is degraded or inhibited in a non-target cell. In some embodiments, the negative TCSRE increases the level or activity of a downregulator or inhibitor of the exogenous agent.

[0165] As used herein, a “non-target cell-specific regulatory element” (or NTCSRE) refers to a nucleic acid sequence that decreases the level of an exogenous agent in a non-target cell compared to in a target cell, wherein the nucleic acid encoding the exogenous agent is operably linked to the NTCSRE. In some embodiments, the NTCSRE is a functional nucleic acid sequence, e.g., a miRNA recognition site that causes degradation or inhibition of the retroviral nucleic acid in a non-target cell. In some embodiments, the nucleic acid sequence encodes a functional RNA sequence, e.g., the nucleic acid encodes an miRNA sequence present in an mRNA encoding an exogenous protein agent, such that the mRNA is degraded or inhibited in a non-target cell. In some embodiments, the NTCSRE increases the level or activity of a downregulator or inhibitor of the exogenous agent. The terms “negative TCSRE” and “NTCSRE” are used interchangeably herein.

[0166] As used herein, a “re-targeted fusogen” refers to a fusogen that comprises a targeting moiety having a sequence that is not part of the naturally-occurring form of the fusogen. In embodiments, the fusogen comprises a different targeting moiety relative to the targeting moiety in the naturally-occurring form of the fusogen. In embodiments, the naturally-occurring form of the fusogen lacks a targeting domain, and the re-targeted fusogen comprises a targeting moiety that is absent from the naturally-occurring form of the fusogen. In embodiments, the fusogen is modified to comprise a targeting moiety. In embodiments, the fusogen comprises one or more sequence alterations outside of the targeting moiety relative to the naturally-occurring form of the fusogen, e.g., in a transmembrane domain, fusogenically active domain, or cytoplasmic domain.

[0167] As used herein, a “retroviral nucleic acid” refers to a nucleic acid containing at least the minimal sequence requirements for packaging into a retrovirus or retroviral vector, alone or in combination with a helper cell, helper virus, or helper plasmid. In some embodiments, the retroviral nucleic acid further comprises or encodes an exogenous agent, a positive target cell-specific regulatory element, a non-target cell-specific regulatory element, or a negative TCSRE. In some embodiments, the retroviral nucleic acid comprises one or more of (e.g., all of) a 5′ LTR (e.g., to promote integration), U3 (e.g., to activate viral genomic RNA transcription), R (e.g., a Tat-binding region), U5, a 3′ LTR (e.g., to promote integration), a packaging site (e.g., psi (Ψ), RRE (e.g., to bind to Rev and promote nuclear export). The retroviral nucleic acid can comprise RNA (e.g., when part of a virion) or DNA (e.g., when being introduced into a source cell or after reverse transcription in a recipient cell). In some embodiments, the retroviral nucleic acid is packaged using a helper cell, helper virus, or helper plasmid which comprises one or more of (e.g., all of) gag, pol, and env.

[0168] As used herein, a “target cell” refers to a cell of a type to which it is desired that a fusosome (e.g., lentiviral vector) deliver an exogenous agent. In embodiments, a target cell is a cell of a specific tissue type or class, e.g., an immune effector cell, e.g., a T cell. In some embodiments, a target cell is a diseased cell, e.g., a cancer cell. In some embodiments, the fusogen, e.g., re-targeted fusogen (alone or in combination with the positive TCSRE, NTCSRE, negative TCSRE, or any combination thereof) leads to preferential delivery of the exogenous agent to a target cell compared to a non-target cell.

[0169] As used herein a “non-target cell” refers to a cell of a type to which it is not desired that a fusosome (e.g., lentiviral vector) deliver an exogenous agent. In some embodiments, a non-target cell is a cell of a specific tissue type or class. In some embodiments, a non-target cell is a non-diseased cell, e.g., a non-cancerous cell. In some embodiments, the fusogen, e.g., re-targeted fusogen (alone or in combination with the positive TCSRE, NTCSRE, negative TCSRE or any combination thereof) leads to lower delivery of the exogenous agent to a non-target cell compared to a target cell.

[0170] As used herein, the terms “treat,” “treating,” or “treatment” refer to ameliorating a disease or disorder, e.g., slowing or arresting or reducing the development of the disease or disorder, e.g., a root cause of the disorder or at least one of the clinical symptoms thereof.

### Fusosomes, e.g., Cell-Derived Fusosomes

[0171] Fusosomes can take various forms. For example, in some embodiments, a fusosome described herein is derived from a source cell. A fusosome may comprise, e.g., an extracellular vesicle, a microvesicle, a nanovesicle, an exosome, an apoptotic body (from apoptotic cells), a microparticle (which may be derived from, e.g., platelets), an ectosome (derivable from, e.g., neutrophiles and monocytes in serum), a prostatosome (obtainable from prostate cancer cells), a cardiosome (derivable from cardiac cells), or any combination thereof. In some embodiments, a fusosome is released naturally from a source cell, and in some embodiments, the source cell is treated to enhance formation of fusosomes. In some embodiments, the fusosome is between about 10-10,000 nm in diameter, e.g., about 30-100 nm in diameter. In some embodiments, the fusosome comprises one or more synthetic lipids.

[0172] In some embodiments, the fusosome is or comprises a virus, e.g., a retrovirus, e.g., a lentivirus. In some embodiments, a fusosome comprising a lipid bilayer comprises a retroviral vector comprising an envelope. For instance, in some embodiments, the fusosome's bilayer of amphipathic lipids is or comprises the viral envelope. The viral envelope may comprise a fusogen, e.g., a fusogen that is endogenous to the virus or a pseudotyped fusogen. In some embodiments, the fusosome's lumen or cavity comprises a viral nucleic acid, e.g., a retroviral nucleic acid, e.g., a lentiviral nucleic acid. The viral nucleic acid may be a viral genome. In some embodiments, the fusosome further comprises one or more viral non-structural proteins, e.g., in its cavity or lumen.

[0173] Fusosomes may have various properties that facilitate delivery of a payload, such as, e.g., a desired transgene or exogenous agent, to a target cell. For instance, in some embodiments, the fusosome and the source cell together comprise nucleic acid(s) sufficient to make a particle that can fuse with a target cell. In embodiments, these nucleic acid(s) encode proteins having one or more of (e.g., all of) the following activities: gag polyprotein activity, polymerase activity, integrase activity, protease activity, and fusogen activity.

[0174] Fusosomes may also comprise various structures that facilitate delivery of a payload to a target cell. For instance, in some embodiments, the fusosome (e.g., virus, e.g., retrovirus, e.g., lentivirus) comprises one or more of (e.g., all of) the following proteins: gag polyprotein, polymerase (e.g., pol), integrase (e.g., a functional or non-functional variant), protease, and a fusogen. In some embodiments, the fusosome further comprises rev. In some embodiments, one or more of the aforesaid proteins are encoded in the retroviral genome, and in some embodiments, one or more of the aforesaid proteins are provided in trans, e.g., by a helper cell, helper virus, or helper plasmid. In some embodiments, the fusosome nucleic acid (e.g., retroviral nucleic acid) comprises one or more of (e.g., all of) the following nucleic acid sequences: 5′ LTR (e.g., comprising U5 and lacking a functional U3 domain), Psi packaging element (Psi), Central polypurine tract (cPPT) Promoter operatively linked to the payload gene, payload gene (optionally comprising an intron before the open reading frame), Poly A tail sequence, WPRE, and 3′ LTR (e.g., comprising U5 and lacking a functional U3). In some embodiments the fusosome nucleic acid (e.g., retroviral nucleic acid) further comprises one or more insulator element. In some embodiments the fusosome nucleic acid (e.g., retroviral nucleic acid) further comprises one or more miRNA recognition sites. In some embodiments, one or more of the miRNA recognition sites are situated downstream of the poly A tail sequence, e.g., between the poly A tail sequence and the WPRE.

[0175] In some embodiments, a fusosome provided herein is administered to a subject, e.g., a mammal, e.g., a human. In such embodiments, the subject may be at risk of, may have a symptom of, or may be diagnosed with or identified as having, a particular disease or condition (e.g., a disease or condition described herein). In one embodiment, the subject has cancer. In one embodiment, the subject has an infectious disease. In some embodiments, the fusosome contains nucleic acid sequences encoding an exogenous agent for treating the disease or condition.

### Lentiviral Components and Helper Cells

[0176] In some embodiments, the retroviral nucleic acid comprises one or more of (e.g., all of): a 5′ promoter (e.g., to control expression of the entire packaged RNA), a 5′ LTR (e.g., that includes R (polyadenylation tail signal) and/or U5 which includes a primer activation signal), a primer binding site, a psi packaging signal, a RRE element for nuclear export, a promoter directly upstream of the transgene to control transgene expression, a transgene (or other exogenous agent element), a polypurine tract, and a 3′ LTR (e.g., that includes a mutated U3, a R, and U5). In some embodiments, the retroviral nucleic acid further comprises one or more of a cPPT, a WPRE, and/or an insulator element.

[0177] A retrovirus typically replicates by reverse transcription of its genomic RNA into a linear double-stranded DNA copy and subsequently covalently integrates its genomic DNA into a host genome. Illustrative retroviruses suitable for use in particular embodiments, include, but are not limited to: Moloney murine leukemia virus (M-MuLV), Moloney murine sarcoma virus (MoMSV), Harvey murine sarcoma virus (HaMuSV), murine mammary tumor virus (MuMTV), gibbon ape leukemia virus (GaLV), feline leukemia virus (FLV), spumavirus, Friend murine leukemia virus, Murine Stem Cell Virus (MSCV) and Rous Sarcoma Virus (RSV)) and lentivirus.

[0178] In some embodiments the retrovirus is a Gammretrovirus. In some embodiments the retrovirus is an Epsilonretrovirus. In some embodiments the retrovirus is an Alpharetrovirus. In some embodiments the retrovirus is a Betaretrovirus. In some embodiments the retrovirus is a Deltaretrovirus. In some embodiments the retrovirus is a Lentivirus. In some embodiments the retrovirus is a Spumaretrovirus. In some embodiments the retrovirus is an endogenous retrovirus.

[0179] Illustrative lentiviruses include, but are not limited to: HIV (human immunodeficiency virus; including HIV type 1, and HIV type 2); visna-maedi virus (VMV) virus; the caprine arthritis-encephalitis virus (CAEV); equine infectious anemia virus (EIAV); feline immunodeficiency virus (FIV); bovine immune deficiency virus (BIV); and simian immunodeficiency virus (SIV). In some embodiments, HIV based vector backbones (i.e., HIV cis-acting sequence elements) are used.

[0180] In some embodiments, a vector herein is a nucleic acid molecule capable transferring or transporting another nucleic acid molecule. The transferred nucleic acid is generally linked to, e.g., inserted into, the vector nucleic acid molecule. A vector may include sequences that direct autonomous replication in a cell, or may include sequences sufficient to allow integration into host cell DNA. Useful vectors include, for example, plasmids (e.g., DNA plasmids or RNA plasmids), transposons, cosmids, bacterial artificial chromosomes, and viral vectors. Useful viral vectors include, e.g., replication defective retroviruses and lentiviruses.

[0181] A viral vector can comprise, e.g., a nucleic acid molecule (e.g., a transfer plasmid) that includes virus-derived nucleic acid elements that typically facilitate transfer of the nucleic acid molecule or integration into the genome of a cell or to a viral particle that mediates nucleic acid transfer. Viral particles will typically include various viral components and sometimes also host cell components in addition to nucleic acid(s). A viral vector can comprise, e.g., a virus or viral particle capable of transferring a nucleic acid into a cell, or to the transferred nucleic acid (e.g., as naked DNA). Viral vectors and transfer plasmids can comprise structural and/or functional genetic elements that are primarily derived from a virus. A retroviral vector can comprise a viral vector or plasmid containing structural and functional genetic elements, or portions thereof, that are primarily derived from a retrovirus. A lentiviral vector can comprise a viral vector or plasmid containing structural and functional genetic elements, or portions thereof, including LTRs that are primarily derived from a lentivirus.

[0182] In embodiments, a lentiviral vector (e.g., lentiviral expression vector) may comprise a lentiviral transfer plasmid (e.g., as naked DNA) or an infectious lentiviral particle. With respect to elements such as cloning sites, promoters, regulatory elements, heterologous nucleic acids, etc., it is to be understood that the sequences of these elements can be present in RNA form in lentiviral particles and can be present in DNA form in DNA plasmids.

[0183] In some vectors described herein, at least part of one or more protein coding regions that contribute to or are essential for replication may be absent compared to the corresponding wild-type virus. This makes the viral vector replication-defective. In some embodiments, the vector is capable of transducing a target non-dividing host cell and/or integrating its genome into a host genome.

[0184] The structure of a wild-type retrovirus genome often comprises a 5′ long terminal repeat (LTR) and a 3′ LTR, between or within which are located a packaging signal to enable the genome to be packaged, a primer binding site, integration sites to enable integration into a host cell genome and gag, pol and env genes encoding the packaging components which promote the assembly of viral particles. More complex retroviruses have additional features, such as rev and RRE sequences in HIV, which enable the efficient export of RNA transcripts of the integrated provirus from the nucleus to the cytoplasm of an infected target cell. In the provirus, the viral genes are flanked at both ends by regions called long terminal repeats (LTRs). The LTRs are involved in proviral integration and transcription. LTRs also serve as enhancer-promoter sequences and can control the expression of the viral genes. Encapsidation of the retroviral RNAs occurs by virtue of a psi sequence located at the 5′ end of the viral genome.

[0185] The LTRs themselves are typically similar (e.g., identical) sequences that can be divided into three elements, which are called U3, R and U5. U3 is derived from the sequence unique to the 3′ end of the RNA. R is derived from a sequence repeated at both ends of the RNA and U5 is derived from the sequence unique to the 5′ end of the RNA. The sizes of the three elements can vary considerably among different retroviruses.

[0186] For the viral genome, the site of transcription initiation is typically at the boundary between U3 and R in one LTR and the site of poly (A) addition (termination) is at the boundary between R and U5 in the other LTR. U3 contains most of the transcriptional control elements of the provirus, which include the promoter and multiple enhancer sequences responsive to cellular and in some cases, viral transcriptional activator proteins. Some retroviruses comprise any one or more of the following genes that code for proteins that are involved in the regulation of gene expression: tot, rev, tax and rex.

[0187] With regard to the structural genes gag, pol and env themselves, gag encodes the internal structural protein of the virus. Gag protein is proteolytically processed into the mature proteins MA (matrix), CA (capsid) and NC (nucleocapsid). The pol gene encodes the reverse transcriptase (RT), which contains DNA polymerase, associated RNase H and integrase (IN), which mediate replication of the genome. The env gene encodes the surface (SU) glycoprotein and the transmembrane (TM) protein of the virion, which form a complex that interacts specifically with cellular receptor proteins. This interaction promotes infection, e.g., by fusion of the viral membrane with the cell membrane.

[0188] In a replication-defective retroviral vector genome gag, pol and env may be absent or not functional. The R regions at both ends of the RNA are typically repeated sequences. U5 and U3 represent unique sequences at the 5′ and 3′ ends of the RNA genome respectively.

[0189] Retroviruses may also contain additional genes which code for proteins other than gag, pol and env. Examples of additional genes include (in HIV), one or more of vif, vpr, vpx, vpu, tat, rev and nef. EIAV has (amongst others) the additional gene S2. Proteins encoded by additional genes serve various functions, some of which may be duplicative of a function provided by a cellular protein. In EIAV, for example, tat acts as a transcriptional activator of the viral LTR (Derse and Newbold 1993 Virology 194:530-6; Maury et al. 1994 Virology 200:632-42). It binds to a stable, stem-loop RNA secondary structure referred to as TAR. Rev regulates and co-ordinates the expression of viral genes through rev-response elements (RRE) (Martarano et al. 1994 J. Virol. 68:3102-11). The mechanisms of action of these two proteins are thought to be broadly similar to the analogous mechanisms in the primate viruses. In addition, an EIAV protein, Ttm, has been identified that is encoded by the first exon of tat spliced to the env coding sequence at the start of the transmembrane protein.

[0190] In addition to protease, reverse transcriptase and integrase, non-primate lentiviruses contain a fourth pol gene product which codes for a dUTPase. This may play a role in the ability of these lentiviruses to infect certain non-dividing or slowly dividing cell types.

[0191] In embodiments, a recombinant lentiviral vector (RLV) is a vector with sufficient retroviral genetic information to allow packaging of an RNA genome, in the presence of packaging components, into a viral particle capable of infecting a target cell. Infection of the target cell can comprise reverse transcription and integration into the target cell genome. The RLV typically carries non-viral coding sequences which are to be delivered by the vector to the target cell. In embodiments, an RLV is incapable of independent replication to produce infectious retroviral particles within the target cell. Usually the RLV lacks a functional gag-pol and/or env gene and/or other genes involved in replication. The vector may be configured as a split-intron vector, e.g., as described in PCT patent application WO 99/15683, which is herein incorporated by reference in its entirety.

[0192] In some embodiments, the lentiviral vector comprises a minimal viral genome, e.g., the viral vector has been manipulated so as to remove the non-essential elements and to retain the essential elements in order to provide the required functionality to infect, transduce and deliver a nucleotide sequence of interest to a target host cell, e.g., as described in WO 98/17815, which is herein incorporated by reference in its entirety.

[0193] A minimal lentiviral genome may comprise, e.g., (5′)R-U5-one or more first nucleotide sequences-U3-R(3′). However, the plasmid vector used to produce the lentiviral genome within a source cell can also include transcriptional regulatory control sequences operably linked to the lentiviral genome to direct transcription of the genome in a source cell. These regulatory sequences may comprise the natural sequences associated with the transcribed retroviral sequence, e.g., the 5′U3 region, or they may comprise a heterologous promoter such as another viral promoter, for example the CMV promoter. Some lentiviral genomes comprise additional sequences to promote efficient virus production. For example, in the case of HIV, rev and RRE sequences may be included. Alternatively or combination, codon optimization may be used, e.g., the gene encoding the exogenous agent may be codon optimized, e.g., as described in WO 01/79518, which is herein incorporated by reference in its entirety. Alternative sequences which perform a similar or the same function as the rev/RRE system may also be used. For example, a functional analogue of the rev/RRE system is found in the Mason Pfizer monkey virus. This is known as CTE and comprises an RRE-type sequence in the genome which is believed to interact with a factor in the infected cell. The cellular factor can be thought of as a rev analogue. Thus, CTE may be used as an alternative to the rev/RRE system. In addition, the Rex protein of HTLV-I can functionally replace the Rev protein of HIV-I. Rev and Rex have similar effects to IRE-BP.

[0194] In some embodiments, a retroviral nucleic acid (e.g., a lentiviral nucleic acid, e.g., a primate or non-primate lentiviral nucleic acid) (1) comprises a deleted gag gene wherein the deletion in gag removes one or more nucleotides downstream of about nucleotide 350 or 354 of the gag coding sequence; (2) has one or more accessory genes absent from the retroviral nucleic acid; (3) lacks the tat gene but includes the leader sequence between the end of the 5′ LTR and the ATG of gag; and (4) combinations of (1), (2) and (3). In an embodiment the lentiviral vector comprises all of features (1) and (2) and (3). This strategy is described in more detail in WO 99/32646, which is herein incorporated by reference in its entirety.

[0195] In some embodiments, a primate lentivirus minimal system requires none of the HIV/SIV additional genes vif, vpr, vpx, vpu, tat, rev and nef for either vector production or for transduction of dividing and non-dividing cells. In some embodiments, an EIAV minimal vector system does not require S2 for either vector production or for transduction of dividing and non-dividing cells.

[0196] The deletion of additional genes may permit vectors to be produced without the genes associated with disease in lentiviral (e.g. HIV) infections. In particular, tat is associated with disease. Secondly, the deletion of additional genes permits the vector to package more heterologous DNA. Thirdly, genes whose function is unknown, such as S2, may be omitted, thus reducing the risk of causing undesired effects. Examples of minimal lentiviral vectors are disclosed in WO 99/32646 and in WO 98/17815.

[0197] In some embodiments, the retroviral nucleic acid is devoid of at least tat and S2 (if it is an EIAV vector system), and possibly also vif, vpr, vpx, vpu and nef. In some embodiments, the retroviral nucleic acid is also devoid of rev, RRE, or both.

[0198] In some embodiments the retroviral nucleic acid comprises vpx. The Vpx polypeptide binds to and induces the degradation of the SAMHD1 restriction factor, which degrades free dNTPs in the cytoplasm. Thus, the concentration of free dNTPs in the cytoplasm increases as Vpx degrades SAMHD1 and reverse transcription activity is increased, thus facilitating reverse transcription of the retroviral genome and integration into the target cell genome.

[0199] Different cells differ in their usage of particular codons. This codon bias corresponds to a bias in the relative abundance of particular tRNAs in the cell type. By altering the codons in the sequence so that they are tailored to match with the relative abundance of corresponding tRNAs, it is possible to increase expression. By the same token, it is possible to decrease expression by deliberately choosing codons for which the corresponding tRNAs are known to be rare in the particular cell type. Thus, an additional degree of translational control is available. An additional description of codon optimization is found, e.g., in WO 99/41397, which is herein incorporated by reference in its entirety.

[0200] Many viruses, including HIV and other lentiviruses, use a large number of rare codons and by changing these to correspond to commonly used mammalian codons, increased expression of the packaging components in mammalian producer cells can be achieved.

[0201] Codon optimization has a number of other advantages. By virtue of alterations in their sequences, the nucleotide sequences encoding the packaging components may have RNA instability sequences (INS) reduced or eliminated from them. At the same time, the amino acid sequence coding sequence for the packaging components is retained so that the viral components encoded by the sequences remain the same, or at least sufficiently similar that the function of the packaging components is not compromised. In some embodiments, codon optimization also overcomes the Rev/RRE requirement for export, rendering optimized sequences Rev independent. In some embodiments, codon optimization also reduces homologous recombination between different constructs within the vector system (for example between the regions of overlap in the gag-pol and env open reading frames). In some embodiments, codon optimization leads to an increase in viral titer and/or improved safety.

[0202] In some embodiments, only codons relating to INS are codon optimized. In other embodiments, the sequences are codon optimized in their entirety, with the exception of the sequence encompassing the frameshift site of gag-pol.

[0203] The gag-pol gene comprises two overlapping reading frames encoding the gag-pol proteins. The expression of both proteins depends on a frameshift during translation. This frameshift occurs as a result of ribosome “slippage” during translation. This slippage is thought to be caused at least in part by ribosome-stalling RNA secondary structures. Such secondary structures exist downstream of the frameshift site in the gag-pol gene. For HIV, the region of overlap extends from nucleotide 1222 downstream of the beginning of gag (wherein nucleotide 1 is the A of the gag ATG) to the end of gag (nt 1503). Consequently, a 281 bp fragment spanning the frameshift site and the overlapping region of the two reading frames is preferably not codon optimized. In some embodiments, retaining this fragment will enable more efficient expression of the gag-pol proteins. For EIAV, the beginning of the overlap is at nt 1262 (where nucleotide 1 is the A of the gag ATG). The end of the overlap is at nt 1461. In order to ensure that the frameshift site and the gag-pol overlap are preserved, the wild type sequence may be retained from nt 1156 to 1465.

[0204] Derivations from optimal codon usage may be made, for example, in order to accommodate convenient restriction sites, and conservative amino acid changes may be introduced into the gag-pol proteins.

[0205] In some embodiments, codon optimization is based on codons with poor codon usage in mammalian systems. The third and sometimes the second and third base may be changed.

[0206] Due to the degenerate nature of the genetic code, it will be appreciated that numerous gag-pol sequences can be achieved by a skilled worker. Also, there are many retroviral variants described which can be used as a starting point for generating a codon optimized gag-pol sequence. Lentiviral genomes can be quite variable. For example there are many quasi-species of HIV-I which are still functional. This is also the case for EIAV. These variants may be used to enhance particular parts of the transduction process. Examples of HIV-I variants may be found in the HIV databases maintained by Los Alamos National Laboratory. Details of EIAV clones may be found at the NCBI database maintained by the National Institutes of Health.

[0207] The strategy for codon optimized gag-pol sequences can be used in relation to any retrovirus, e.g., EIAV, FIV, BIV, CAEV, VMR, SIV, HIV-I and HIV-2. In addition this method could be used to increase expression of genes from HTLV-I, HTLV-2, HFV, HSRV and human endogenous retroviruses (HERV), MLV and other retroviruses.

[0208] As described above, the packaging components for a retroviral vector can include expression products of gag, pol and env genes. In addition, packaging can utilize a short sequence of 4 stem loops followed by a partial sequence from gag and env as a packaging signal.

[0209] Thus, inclusion of a deleted gag sequence in the retroviral vector genome (in addition to the full gag sequence on the packaging construct) can be used. In embodiments, the retroviral vector comprises a packaging signal that comprises from 255 to 360 nucleotides of gag in vectors that still retain env sequences, or about 40 nucleotides of gag in a particular combination of splice donor mutation, gag and env deletions. In some embodiments, the retroviral vector includes a gag sequence which comprises one or more deletions, e.g., the gag sequence comprises about 360 nucleotides derivable from the N-terminus.

[0210] The retroviral vector, helper cell, helper virus, or helper plasmid may comprise retroviral structural and accessory proteins, for example gag, pol, env, tat, rev, vif, vpr, vpu, vpx, or nef proteins or other retroviral proteins. In some embodiments the retroviral proteins are derived from the same retrovirus. In some embodiments the retroviral proteins are derived from more than one retrovirus, e.g. 2, 3, 4, or more retroviruses.

[0211] The gag and pol coding sequences are generally organized as the Gag-Pol Precursor in native lentivirus. The gag sequence codes for a 55-kD Gag precursor protein, also called p55.

[0212] The p55 is cleaved by the virally encoded protease4 (a product of the pol gene) during the process of maturation into four smaller proteins designated MA (matrix [p17]), CA (capsid [p24]), NC (nucleocapsid [p9]), and p6. The pol precursor protein is cleaved away from Gag by a virally encoded protease, and further digested to separate the protease (p10), RT (p50), RNase H (p15), and integrase (p31) activities.

[0213] Native Gag-Pol sequences can be utilized in a helper vector (e.g., helper plasmid or helper virus), or modifications can be made. These modifications include, chimeric Gag-Pol, where the Gag and Pol sequences are obtained from different viruses (e.g., different species, subspecies, strains, clades, etc.), and/or where the sequences have been modified to improve transcription and/or translation, and/or reduce recombination.

[0214] In various examples, the retroviral nucleic acid includes a polynucleotide encoding a 150-250 (e.g., 168) nucleotide portion of a gag protein that (i) includes a mutated INS1 inhibitory sequence that reduces restriction of nuclear export of RNA relative to wild-type INS1, (ii) contains two nucleotide insertion that results in frame shift and premature termination, and/or (iii) does not include INS2, INS3, and INS4 inhibitory sequences of gag.

[0215] In some embodiments, a vector described herein is a hybrid vector that comprises both retroviral (e.g., lentiviral) sequences and non-lentiviral viral sequences. In some embodiments, a hybrid vector comprises retroviral e.g., lentiviral, sequences for reverse transcription, replication, integration and/or packaging.

[0216] According to certain specific embodiments, most or all of the viral vector backbone sequences are derived from a lentivirus, e.g., HIV-1. However, it is to be understood that many different sources of retroviral and/or lentiviral sequences can be used, or combined and numerous substitutions and alterations in certain of the lentiviral sequences may be accommodated without impairing the ability of a transfer vector to perform the functions described herein. A variety of lentiviral vectors are described in Naldini et al., (1996a, 1996b, and 1998); Zufferey et al., (1997); Dull et al., 1998, U.S. Pat. Nos. 6,013,516; and 5,994,136, many of which may be adapted to produce a retroviral nucleic acid.

[0217] At each end of the provirus, long terminal repeats (LTRs) are typically found. An LTR typically comprises a domain located at the ends of retroviral nucleic acid which, in their natural sequence context, are direct repeats and contain U3, R and U5 regions. LTRs generally promote the expression of retroviral genes (e.g., promotion, initiation and polyadenylation of gene transcripts) and viral replication. The LTR can comprise numerous regulatory signals including transcriptional control elements, polyadenylation signals and sequences for replication and integration of the viral genome. The viral LTR is typically divided into three regions called U3, R and U5. The U3 region typically contains the enhancer and promoter elements. The U5 region is typically the sequence between the primer binding site and the R region and can contain the polyadenylation sequence. The R (repeat) region can be flanked by the U3 and U5 regions. The LTR is typically composed of U3, R and U5 regions and can appear at both the 5′ and 3′ ends of the viral genome. In some embodiments, adjacent to the 5′ LTR are sequences for reverse transcription of the genome (the tRNA primer binding site) and for efficient packaging of viral RNA into particles (the Psi site).

[0218] A packaging signal can comprise a sequence located within the retroviral genome which mediate insertion of the viral RNA into the viral capsid or particle, see e.g., Clever et al., 1995. J. of Virology, Vol. 69, No. 4; pp. 2101-2109. Several retroviral vectors use a minimal packaging signal (a psi [Ψ] sequence) for encapsidation of the viral genome.

[0219] In various embodiments, retroviral nucleic acids comprise modified 5′ LTR and/or 3′ LTRs. Either or both of the LTR may comprise one or more modifications including, but not limited to, one or more deletions, insertions, or substitutions. Modifications of the 3′ LTR are often made to improve the safety of lentiviral or retroviral systems by rendering viruses replication-defective, e.g., virus that is not capable of complete, effective replication such that infective virions are not produced (e.g., replication-defective lentiviral progeny).

[0220] In some embodiments, a vector is a self-inactivating (SIN) vector, e.g., replication-defective vector, e.g., retroviral or lentiviral vector, in which the right (3′) LTR enhancer-promoter region, known as the U3 region, has been modified (e.g., by deletion or substitution) to prevent viral transcription beyond the first round of viral replication. This is because the right (3′) LTR U3 region can be used as a template for the left (5′) LTR U3 region during viral replication and, thus, absence of the U3 enhancer-promoter inhibits viral replication. In embodiments, the 3′ LTR is modified such that the U5 region is removed, altered, or replaced, for example, with an exogenous poly(A) sequence The 3′ LTR, the 5′ LTR, or both 3′ and 5′ LTRs, may be modified LTRs.

[0221] In some embodiments, the U3 region of the 5′ LTR is replaced with a heterologous promoter to drive transcription of the viral genome during production of viral particles. Examples of heterologous promoters which can be used include, for example, viral simian virus 40 (SV40) (e.g., early or late), cytomegalovirus (CMV) (e.g., immediate early), Moloney murine leukemia virus (MoMLV), Rous sarcoma virus (RSV), and herpes simplex virus (HSV) (thymidine kinase) promoters. In some embodiments, promoters are able to drive high levels of transcription in a Tat-independent manner. In certain embodiments, the heterologous promoter has additional advantages in controlling the manner in which the viral genome is transcribed. For example, the heterologous promoter can be inducible, such that transcription of all or part of the viral genome will occur only when the induction factors are present. Induction factors include, but are not limited to, one or more chemical compounds or the physiological conditions such as temperature or pH, in which the host cells are cultured.

[0222] In some embodiments, viral vectors comprise a TAR (trans-activation response) element, e.g., located in the R region of lentiviral (e.g., HIV) LTRs. This element interacts with the lentiviral trans-activator (tat) genetic element to enhance viral replication. However, this element is not required, e.g., in embodiments wherein the U3 region of the 5′ LTR is replaced by a heterologous promoter.

[0223] The R region, e.g., the region within retroviral LTRs beginning at the start of the capping group (i.e., the start of transcription) and ending immediately prior to the start of the poly A tract can be flanked by the U3 and U5 regions. The R region plays a role during reverse transcription in the transfer of nascent DNA from one end of the genome to the other.

[0224] The retroviral nucleic acid can also comprise a FLAP element, e.g., a nucleic acid whose sequence includes the central polypurine tract and central termination sequences (cPPT and CTS) of a retrovirus, e.g., HIV-1 or HIV-2. Suitable FLAP elements are described in U.S. Pat. No. 6,682,907 and in Zennou, et al., 2000, Cell, 101:173, which are herein incorporated by reference in their entireties. During HIV-1 reverse transcription, central initiation of the plus-strand DNA at the central polypurine tract (cPPT) and central termination at the central termination sequence (CTS) can lead to the formation of a three-stranded DNA structure: the HIV-1 central DNA flap. In some embodiments, the retroviral or lentiviral vector backbones comprise one or more FLAP elements upstream or downstream of the gene encoding the exogenous agent. For example, in some embodiments a transfer plasmid includes a FLAP element, e.g., a FLAP element derived or isolated from HIV-1.

[0225] In embodiments, a retroviral or lentiviral nucleic acid comprises one or more export elements, e.g., a cis-acting post-transcriptional regulatory element which regulates the transport of an RNA transcript from the nucleus to the cytoplasm of a cell. Examples of RNA export elements include, but are not limited to, the human immunodeficiency virus (HIV) rev response element (RRE) (see e.g., Cullen et al., 1991. J. Virol. 65: 1053; and Cullen et al., 1991. Cell 58: 423), and the hepatitis B virus post-transcriptional regulatory element (HPRE), which are herein incorporated by reference in their entireties. Generally, the RNA export element is placed within the 3′ UTR of a gene, and can be inserted as one or multiple copies.

[0226] In some embodiments, expression of heterologous sequences in viral vectors is increased by incorporating one or more of, e.g., all of, posttranscriptional regulatory elements, polyadenylation sites, and transcription termination signals into the vectors. A variety of posttranscriptional regulatory elements can increase expression of a heterologous nucleic acid at the protein, e.g., woodchuck hepatitis virus posttranscriptional regulatory element (WPRE; Zufferey et al., 1999, J. Virol., 73:2886); the posttranscriptional regulatory element present in hepatitis B virus (HPRE) (Huang et al., Mol. Cell. Biol., 5:3864); and the like (Liu et al., 1995, Genes Dev., 9:1766), each of which is herein incorporated by reference in its entirety. In some embodiments, a retroviral nucleic acid described herein comprises a posttranscriptional regulatory element such as a WPRE or HPRE

[0227] In some embodiments, a retroviral nucleic acid described herein lacks or does not comprise a posttranscriptional regulatory element such as a WPRE or HPRE.

[0228] Elements directing the termination and polyadenylation of the heterologous nucleic acid transcripts may be included, e.g., to increases expression of the exogenous agent. Transcription termination signals may be found downstream of the polyadenylation signal. In some embodiments, vectors comprise a polyadenylation sequence 3′ of a polynucleotide encoding the exogenous agent. A polyA site may comprise a DNA sequence which directs both the termination and polyadenylation of the nascent RNA transcript by RNA polymerase II. Polyadenylation sequences can promote mRNA stability by addition of a polyA tail to the 3′ end of the coding sequence and thus, contribute to increased translational efficiency. Illustrative examples of polyA signals that can be used in a retroviral nucleic acid, include AATAAA, ATTAAA, AGTAAA, a bovine growth hormone polyA sequence (BGHpA), a rabbit β-globin polyA sequence (rpgpA), or another suitable heterologous or endogenous polyA sequence.

[0229] In some embodiments, a retroviral or lentiviral vector further comprises one or more insulator elements, e.g., an insulator element described herein.

[0230] In various embodiments, the vectors comprise a promoter operably linked to a polynucleotide encoding an exogenous agent. The vectors may have one or more LTRs, wherein either LTR comprises one or more modifications, such as one or more nucleotide substitutions, additions, or deletions. The vectors may further comprise one of more accessory elements to increase transduction efficiency (e.g., a cPPT/FLAP), viral packaging (e.g., a Psi (Ψ) packaging signal, RRE), and/or other elements that increase exogenous gene expression (e.g., poly (A) sequences), and may optionally comprise a WPRE or HPRE.

[0231] In some embodiments, a lentiviral nucleic acid comprises one or more of, e.g., all of, e.g., from 5′ to 3′, a promoter (e.g., CMV), an R sequence (e.g., comprising TAR), a U5 sequence (e.g., for integration), a PBS sequence (e.g., for reverse transcription), a DIS sequence (e.g., for genome dimerization), a psi packaging signal, a partial gag sequence, an RRE sequence (e.g., for nuclear export), a cPPT sequence (e.g., for nuclear import), a promoter to drive expression of the exogenous agent, a gene encoding the exogenous agent, a WPRE sequence (e.g., for efficient transgene expression), a PPT sequence (e.g., for reverse transcription), an R sequence (e.g., for polyadenylation and termination), and a U5 signal (e.g., for integration).

### Vectors Engineered to Remove Splice Sites

[0232] Some lentiviral vectors integrate inside active genes and possess strong splicing and polyadenylation signals that could lead to the formation of aberrant and possibly truncated transcripts.

[0233] Mechanisms of proto-oncogene activation may involve the generation of chimeric transcripts originating from the interaction of promoter elements or splice sites contained in the genome of the insertional mutagen with the cellular transcriptional unit targeted by integration (Gabriel et al. 2009. Nat Med 15: 1431-1436; Bokhoven, et al. J Virol 83:283-29). Chimeric fusion transcripts comprising vector sequences and cellular mRNAs can be generated either by read-through transcription starting from vector sequences and proceeding into the flanking cellular genes, or vice versa.

[0234] In some embodiments, a lentiviral nucleic acid described herein comprises a lentiviral backbone in which at least two of the splice sites have been eliminated, e.g., to improve the safety profile of the lentiviral vector. Species of such splice sites and methods of identification are described in WO2012156839A2, all of which is included by reference.

[0235] Retroviral Production Methods

[0236] Large scale viral particle production is often useful to achieve a desired viral titer. Viral particles can be produced by transfecting a transfer vector into a packaging cell line that comprises viral structural and/or accessory genes, e.g., gag, pol, env, tat, rev, vif, vpr, vpu, vpx, or nef genes or other retroviral genes.

[0237] In embodiments, the packaging vector is an expression vector or viral vector that lacks a packaging signal and comprises a polynucleotide encoding one, two, three, four or more viral structural and/or accessory genes. Typically, the packaging vectors are included in a packaging cell, and are introduced into the cell via transfection, transduction or infection. A retroviral, e.g., lentiviral, transfer vector can be introduced into a packaging cell line, via transfection, transduction or infection, to generate a source cell or cell line. The packaging vectors can be introduced into human cells or cell lines by standard methods including, e.g., calcium phosphate transfection, lipofection or electroporation. In some embodiments, the packaging vectors are introduced into the cells together with a dominant selectable marker, such as neomycin, hygromycin, puromycin, blastocidin, zeocin, thymidine kinase, DHFR, Gln synthetase or ADA, followed by selection in the presence of the appropriate drug and isolation of clones. A selectable marker gene can be linked physically to genes encoding by the packaging vector, e.g., by IRES or self cleaving viral peptides.

[0238] Packaging cell lines include cell lines that do not contain a packaging signal, but do stably or transiently express viral structural proteins and replication enzymes (e.g., gag, pol and env) which can package viral particles. Any suitable cell line can be employed, e.g., mammalian cells, e.g., human cells. Suitable cell lines which can be used include, for example, CHO cells, BHK cells, MDCK cells, C3H 10T1/2 cells, FLY cells, Psi-2 cells, BOSC 23 cells, PA317 cells, WEHI cells, COS cells, BSC 1 cells, BSC 40 cells, BMT 10 cells, VERO cells, W138 cells, MRC5 cells, A549 cells, HT1080 cells, 293 cells, 293T cells, B-50 cells, 3T3 cells, NIH3T3 cells, HepG2 cells, Saos-2 cells, Huh7 cells, HeLa cells, W163 cells, 211 cells, and 211A cells. In embodiments, the packaging cells are 293 cells, 293T cells, or A549 cells.

[0239] A source cell line includes a cell line which is capable of producing recombinant retroviral particles, comprising a packaging cell line and a transfer vector construct comprising a packaging signal. Methods of preparing viral stock solutions are illustrated by, e.g., Y. Soneoka et al. (1995) Nucl. Acids Res. 23:628-633, and N. R. Landau et al. (1992) J. Virol. 66:5110-5113, which are incorporated herein by reference. Infectious virus particles may be collected from the packaging cells, e.g., by cell lysis, or collection of the supernatant of the cell culture. Optionally, the collected virus particles may be enriched or purified.

[0240] Packaging Plasmids and Cell Lines

[0241] In some embodiments, the source cell comprises one or more plasmids coding for viral structural proteins and replication enzymes (e.g., gag, pol and env) which can package viral particles. In some embodiments, the sequences coding for at least two of the gag, pol, and env precursors are on the same plasmid. In some embodiments, the sequences coding for the gag, pol, and env precursors are on different plasmids. In some embodiments, the sequences coding for the gag, pol, and env precursors have the same expression signal, e.g., promoter. In some embodiments, the sequences coding for the gag, pol, and env precursors have a different expression signal, e.g., different promoters. In some embodiments, expression of the gag, pol, and env precursors is inducible. In some embodiments, the plasmids coding for viral structural proteins and replication enzymes are transfected at the same time or at different times. In some embodiments, the plasmids coding for viral structural proteins and replication enzymes are transfected at the same time or at a different time from the packaging vector.

[0242] In some embodiments, the source cell line comprises one or more stably integrated viral structural genes. In some embodiments expression of the stably integrated viral structural genes is inducible.

[0243] In some embodiments, expression of the viral structural genes is regulated at the transcriptional level. In some embodiments, expression of the viral structural genes is regulated at the translational level. In some embodiments, expression of the viral structural genes is regulated at the post-translational level.

[0244] In some embodiments, expression of the viral structural genes is regulated by a tetracycline (Tet)-dependent system, in which a Tet-regulated transcriptional repressor (Tet-R) binds to DNA sequences included in a promoter and represses transcription by steric hindrance (Yao et al, 1998; Jones et al, 2005). Upon addition of doxycycline (dox), Tet-R is released, allowing transcription. Multiple other suitable transcriptional regulatory promoters, transcription factors, and small molecule inducers are suitable to regulate transcription of viral structural genes.

[0245] In some embodiments, the third-generation lentivirus components, human immunodeficiency virus type 1 (HIV) Rev, Gag/Pol, and an envelope under the control of Tet-regulated promoters and coupled with antibiotic resistance cassettes are separately integrated into the source cell genome. In some embodiments the source cell only has one copy of each of Rev, Gag/Pol, and an envelope protein integrated into the genome.

[0246] In some embodiments a nucleic acid encoding the exogenous agent (e.g., a retroviral nucleic acid encoding the exogenous agent) is also integrated into the source cell genome. In some embodiments a nucleic acid encoding the exogenous agent is maintained episomally. In some embodiments a nucleic acid encoding the exogenous agent is transfected into the source cell that has stably integrated Rev, Gag/Pol, and an envelope protein in the genome. See, e.g., Milani et al. EMBO Molecular Medicine, 2017, which is herein incorporated by reference in its entirety.

[0247] In some embodiments, a retroviral nucleic acid described herein is unable to undergo reverse transcription. Such a nucleic acid, in embodiments, is able to transiently express an exogenous agent. The retrovirus or VLP, may comprise a disabled reverse transcriptase protein, or may not comprise a reverse transcriptase protein. In embodiments, the retroviral nucleic acid comprises a disabled primer binding site (PBS) and/or att site. In embodiments, one or more viral accessory genes, including rev, tat, vif, nef, vpr, vpu, vpx and S2 or functional equivalents thereof, are disabled or absent from the retroviral nucleic acid. In embodiments, one or more accessory genes selected from S2, rev and tat are disabled or absent from the retroviral nucleic acid.

### Strategies for Packaging a Retroviral Nucleic Acid

[0248] Typically, modern retroviral vector systems consist of viral genomes bearing cis-acting vector sequences for transcription, reverse-transcription, integration, translation and packaging of viral RNA into the viral particles, and (2) producer cells lines which express the trans-acting retroviral gene sequences (e.g., gag, pol and env) needed for production of virus particles. By separating the cis-and trans-acting vector sequences completely, the virus is unable to maintain replication for more than one cycle of infection. Generation of live virus can be avoided by a number of strategies, e.g., by minimizing the overlap between the cis-and trans-acting sequences to avoid recombination.

[0249] A viral vector particle which comprises a sequence that is devoid of or lacking viral RNA may be the result of removing or eliminating the viral RNA from the sequence. In one embodiment this may be achieved by using an endogenous packaging signal binding site on gag. Alternatively, the endogenous packaging signal binding site is on pol. In this embodiment, the RNA which is to be delivered will contain a cognate packaging signal. In another embodiment, a heterologous binding domain (which is heterologous to gag) located on the RNA to be delivered, and a cognate binding site located on gag or pol, can be used to ensure packaging of the RNA to be delivered. The heterologous sequence could be non-viral or it could be viral, in which case it may be derived from a different virus. The vector particles could be used to deliver therapeutic RNA, in which case functional integrase and/or reverse transcriptase is not required. These vector particles could also be used to deliver a therapeutic gene of interest, in which case pol is typically included.

[0250] In an embodiment, gag-pol are altered, and the packaging signal is replaced with a corresponding packaging signal. In this embodiment, the particle can package the RNA with the new packaging signal. The advantage of this approach is that it is possible to package an RNA sequence which is devoid of viral sequence for example, RNAi.

[0251] An alternative approach is to rely on over-expression of the RNA to be packaged. In one embodiment the RNA to be packaged is over-expressed in the absence of any RNA containing a packaging signal. This may result in a significant level of therapeutic RNA being packaged, and that this amount is sufficient to transduce a cell and have a biological effect.

[0252] In some embodiments, a polynucleotide comprises a nucleotide sequence encoding a viral gag protein or retroviral gag and pol proteins, wherein the gag protein or pol protein comprises a heterologous RNA binding domain capable of recognising a corresponding sequence in an RNA sequence to facilitate packaging of the RNA sequence into a viral vector particle.

[0253] In some embodiments, the heterologous RNA binding domain comprises an RNA binding domain derived from a bacteriophage coat protein, a Rev protein, a protein of the U1 small nuclear ribonucleoprotein particle, a Nova protein, a TF111A protein, a TIS11 protein, a trp RNA-binding attenuation protein (TRAP) or a pseudouridine synthase.

[0254] In some embodiments, a method herein comprises detecting or confirming the absence of replication competent retrovirus. The methods may include assessing RNA levels of one or more target genes, such as viral genes, e.g. structural or packaging genes, from which gene products are expressed in certain cells infected with a replication-competent retrovirus, such as a gammaretrovirus or lentivirus, but not present in a viral vector used to transduce cells with a heterologous nucleic acid and not, or not expected to be, present and/or expressed in cells not containing replication-competent retrovirus. Replication competent retrovirus may be determined to be present if RNA levels of the one or more target genes is higher than a reference value, which can be measured directly or indirectly, e.g. from a positive control sample containing the target gene. For further disclosure, see WO2018023094A1.

[0255] Repression of a Gene Encoding an Exogenous Agent in a Source Cell

[0256] (Over-)expressed protein in the source cell may have an indirect or direct effect on vector virion assembly and/or infectivity. Incorporation of the exogenous agent into vector virions may also impact downstream processing of vector particles.

[0257] In some embodiments, a tissue-specific promoter is used to limit expression of the exogenous agent in source cells. In some embodiments, a heterologous translation control system is used in eukaryotic cell cultures to repress the translation of the exogenous agent in source cells. More specifically, the retroviral nucleic acid may comprise a binding site operably linked to the gene encoding the exogenous agent, wherein the binding site is capable of interacting with an RNA-binding protein such that translation of the exogenous agent is repressed or prevented in the source cell.

[0258] In some embodiments, the RNA-binding protein is tryptophan RNA-binding attenuation protein (TRAP), for example bacterial tryptophan RNA-binding attenuation protein. The use of an RNA-binding protein (e.g. the bacterial trp operon regulator protein, tryptophan RNA-binding attenuation protein, TRAP), and RNA targets to which it binds, will repress or prevent transgene translation within a source cell. This system is referred to as the Transgene Repression In vector Production cell system or TRIP system.

[0259] In embodiments, the placement of a binding site for an RNA binding protein (e.g., a TRAP-binding sequence, tbs) upstream of the NOI translation initiation codon allows specific repression of translation of mRNA derived from the internal expression cassette, while having no detrimental effect on production or stability of vector RNA. The number of nucleotides between the tbs and translation initiation codon of the gene encoding the exogenous agent may be varied from 0 to 12 nucleotides. The tbs may be placed downstream of an internal ribosome entry site (IRES) to repress translation of the gene encoding the exogenous agent in a multicistronic mRNA.

[0260] Kill Switch Systems and Amplification

[0261] In some embodiments, a polynucleotide or cell harboring the gene encoding the exogenous agent utilizes a suicide gene, e.g., an inducible suicide gene, to reduce the risk of direct toxicity and/or uncontrolled proliferation. In specific aspects, the suicide gene is not immunogenic to the host cell harboring the exogenous agent. Examples of suicide genes include caspase-9, caspase-8, or cytosine deaminase. Caspase-9 can be activated using a specific chemical inducer of dimerization (CID).

[0262] In certain embodiments, vectors comprise gene segments that cause target cells, e.g., immune effector cells, e.g., T cells, to be susceptible to negative selection in vivo. For instance, the transduced cell can be eliminated as a result of a change in the in vivo condition of the individual. The negative selectable phenotype may result from the insertion of a gene that confers sensitivity to an administered agent, for example, a compound. Negative selectable genes are known in the art, and include, inter alia the following: the Herpes simplex virus type I thymidine kinase (HSV-I TK) gene (Wigler et al., Cell 11:223, 1977) which confers ganciclovir sensitivity; the cellular hypoxanthine phosphribosyltransferase (HPRT) gene, the cellular adenine phosphoribosyltransferase (APRT) gene, and bacterial cytosine deaminase, (Mullen et al., Proc. Natl. Acad. Sci. USA. 89:33 (1992)).

[0263] In some embodiments, transduced cells, e.g., immune effector cells, such as T cells, comprise a polynucleotide further comprising a positive marker that enables the selection of cells of the negative selectable phenotype in vitro. The positive selectable marker may be a gene which, upon being introduced into the target cell, expresses a dominant phenotype permitting positive selection of cells carrying the gene. Genes of this type include, inter alia, hygromycin-B phosphotransferase gene (hph) which confers resistance to hygromycin B, the amino glycoside phosphotransferase gene (neo or aph) from Tn5 which codes for resistance to the antibiotic G418, the dihydrofolate reductase (DHFR) gene, the adenosine deaminase gene (ADA), and the multi-drug resistance (MDR) gene.

[0264] In some embodiments, the positive selectable marker and the negative selectable element are linked such that loss of the negative selectable element necessarily also is accompanied by loss of the positive selectable marker. For instance, the positive and negative selectable markers can be fused so that loss of one obligatorily leads to loss of the other. An example of a fused polynucleotide that yields as an expression product a polypeptide that confers both the desired positive and negative selection features described above is a hygromycin phosphotransferase thymidine kinase fusion gene (HyTK). Expression of this gene yields a polypeptide that confers hygromycin B resistance for positive selection in vitro, and ganciclovir sensitivity for negative selection in vivo. See Lupton S. D., et al, Mol. and Cell. Biology 1 1:3374-3378, 1991. In addition, in embodiments, the polynucleotides encoding the chimeric receptors are in retroviral vectors containing the fused gene, particularly those that confer hygromycin B resistance for positive selection in vitro, and ganciclovir sensitivity for negative selection in vivo, for example the HyTK retroviral vector described in Lupton, S. D. et al. (1991), supra. See also the publications of PCT U591/08442 and PCT/US94/05601, describing the use of bifunctional selectable fusion genes derived from fusing a dominant positive selectable markers with negative selectable markers.

[0265] Suitable positive selectable markers can be derived from genes selected from the group consisting of hph, nco, and gpt, and suitable negative selectable markers can be derived from genes selected from the group consisting of cytosine deaminase, HSV-I TK, VZV TK, HPRT, APRT and gpt. Other suitable markers are bifunctional selectable fusion genes wherein the positive selectable marker is derived from hph or neo, and the negative selectable marker is derived from cytosine deaminase or a TK gene or selectable marker.

### Strategies for Regulating Lentiviral Integration

[0266] Retroviral and lentiviral nucleic acids are disclosed which are lacking or disabled in key proteins/sequences so as to prevent integration of the retroviral or lentiviral genome into the target cell genome. For instance, viral nucleic acids lacking each of the amino acids making up the highly conserved DDE motif (Engelman and Craigie (1992) J. Virol. 66:6361-6369; Johnson et al. (1986) Proc. Nat. Acad. Sci. USA 83:7648-7652; Khan et al. (1991) Nucleic Acids Res. 19:851-860) of retroviral integrase enables the production of integration defective retroviral nucleic acids.

[0267] For instance, in some embodiments, a retroviral nucleic acid herein comprises a lentiviral integrase comprising a mutation that causes said integrase to be unable to catalyze the integration of the viral genome into a cell genome. In some embodiments, said mutations are type I mutations which affect directly the integration, or type II mutations which trigger pleiotropic defects affecting virion morphogenesis and/or reverse transcription. Illustrative non-limitative examples of type I mutations are those mutations affecting any of the three residues that participate in the catalytic core domain of the integrase: DX₃₉₋₅₈DX₃₅E (D64, D116 and E152 residues of the integrase of the HIV-1). In a particular embodiment, the mutation that causes said integrase to be unable to catalyze the integration of the viral genome into a cell genome is the substitution of one or more amino acid residues of the DDE motif of the catalytic core domain of the integrase, preferably the substitution of the first aspartic residue of said DEE motif by an asparagine residue. In some embodiment the retroviral vector does not comprise an integrase protein.

[0268] In some embodiments the retrovirus integrates into active transcription units. In some embodiments the retrovirus does not integrate near transcriptional start sites, the 5′ end of genes, or DNAsel cleavage sites. In some embodiments the retrovirus integration does not active proto-oncogenes or inactive tumor suppressor genes. In some embodiments the retrovirus is not genotoxic. In some embodiments the lentivirus integrates into introns.

[0269] In some embodiments, the retroviral nucleic acid integrates into the genome of a target cell with a particular copy number. The average copy number may be determined from single cells, a population of cells, or individual cell colonies. Exemplary methods for determining copy number include polymerase chain reaction (PCR) and flow cytometry.

[0270] In some embodiments DNA encoding the exogenous agent is integrated into the genome. In some embodiments DNA encoding the exogenous agent is maintained episomally. In some embodiments the ratio of integrated to episomal DNA encoding the exogenous agent is at least 0.01, 0.1, 0.5, 1.0, 2, 5, 10, 100.

[0271] In some embodiments DNA encoding the exogenous agent is linear. In some embodiments DNA encoding the exogenous agent is circular. In some embodiments the ratio of linear to circular copies of DNA encoding the exogenous agent is at least 0.01, 0.1, 0.5, 1.0, 2, 5, 10, 100.

[0272] In embodiments the DNA encoding the exogenous agent is circular with 1 LTR. In some embodiments the DNA encoding the exogenous agent is circular with 2 LTRs. In some embodiments the ratio of circular, 1 LTR-comprising DNA encoding the exogenous agent to circular, 2 LTR-comprising DNA encoding the exogenous agent is at least 0.1, 0.5, 1.0, 2, 5, 10, 20, 50, 100.

### Maintenance of an Episomal Virus

[0273] In retroviruses deficient in integration, circular cDNA off-products of the retrotranscription (e.g., 1-LTR and 2-LTR) can accumulate in the cell nucleus without integrating into the host genome (see Yinez-Munoz R J et al., Nat. Med. 2006, 12: 348-353). Like other exogenous DNA those intermediates can then integrate in the cellular DNA at equal frequencies (e.g., 10³ to 10⁵/cell).

[0274] In some embodiments, episomal retroviral nucleic acid does not replicate. Episomal virus DNA can be modified to be maintained in replicating cells through the inclusion of eukaryotic origin of replication and a scaffold/matrix attachment region (S/MAR) for association with the nuclear matrix.

[0275] Thus, in some embodiments, a retroviral nucleic acid described herein comprises a eukaryotic origin of replication or a variant thereof. Examples of eukaryotic origins of replication of interest are the origin of replication of the β-globin gene as have been described by Aladjem et al (Science, 1995, 270: 815-819), a consensus sequence from autonomously replicating sequences associated with alpha-satellite sequences isolated previously from monkey CV-1 cells and human skin fibroblasts as has been described by Price et al Journal of Biological Chemistry, 2003, 278 (22): 19649-59, the origin of replication of the human c-myc promoter region has have been described by McWinney and Leffak (McWinney C. and Leffak M., Nucleic Acid Research 1990, 18(5): 1233-42). In embodiments, the variant substantially maintains the ability to initiate the replication in eukaryotes. The ability of a particular sequence of initiating replication can be determined by any suitable method, for example, the autonomous replication assay based on bromodeoxyuridine incorporation and density shift (Araujo F. D. et al., supra; Frappier L. et al., supra).

[0276] In some embodiments, the retroviral nucleic acid comprises a scaffold/matrix attachment region (S/MAR) or variant thereof, e.g., a non-consensus-like AT-rich DNA element several hundred base pairs in length, which organizes the nuclear DNA of the eukaryotic genome into chromatin domains, by periodic attachment to the protein scaffold or matrix of the cell nucleus. They are typically found in non-coding regions such as flanking regions, chromatin border regions, and introns. Examples of S/MAR regions are 1.8 kbp S/MAR of the human IFN-γ gene (hIFN-γ^{large}) as described by Bode et al (Bode J. et al., Science, 1992, 255: 195-7), the 0.7 Kbp minimal region of the S/MAR of the human IFN-γ gene (hIFN-γ^{short}) as has have been described by Ramezani (Ramezani A. et al., Blood 2003, 101: 4717-24), the 0.2 Kbp minimal region of the S/MAR of the human dehydrofolate reductase gene (hDHFR) as has been described by Mesner L. D. et al., Proc Natl Acad Sci USA, 2003, 100: 3281-86). In embodiments, the functionally equivalent variant of the S/MAR is a sequence selected based on the set six rules that together or alone have been suggested to contribute to S/MAR function (Kramer et al (1996) Genomics 33, 305; Singh et al (1997) Nucl. Acids Res 25, 1419). These rules have been merged into the MAR-Wiz computer program freely available at genomecluster.secs.oakland.edu/MAR-Wiz. In embodiments, the variant substantially maintains the same functions of the S/MAR from which it derives, in particular, the ability to specifically bind to the nuclear the matrix. The skilled person can determine if a particular variant is able to specifically bind to the nuclear matrix, for example by the in vitro or in vivo MAR assays described by Mesner et al. (Mesner L. D. et al, supra). In some embodiments, a specific sequence is a variant of a S/MAR if the particular variant shows propensity for DNA strand separation. This property can be determined using a specific program based on methods from equilibrium statistical mechanics. The stress-induced duplex destabilization (SIDD) analysis technique “[ . . . ] calculates the extent to which the imposed level of superhelical stress decreases the free energy needed to open the duplex at each position along a DNA sequence. The results are displayed as an SIDD profile, in which sites of strong destabilization appear as deep minima [ . . . ]” as defined in Bode et al (2005) J. Mol. Biol. 358,597. The SIDD algorithm and the mathematical basis (Bi and Benham (2004) Bioinformatics 20, 1477) and the analysis of the SIDD profile can be performed using the freely available internet resource at WebSIDD (www.genomecenter.ucdavis.edu/benham). Accordingly, in some embodiment, the polynucleotide is considered a variant of the S/MAR sequence if it shows a similar SIDD profile as the S/MAR.

### Fusogens and Pseudotyping

[0277] Fusogens, which include, viral envelope proteins (env), generally determine the range of host cells which can be infected and transformed by fusosomes. In the case of lentiviruses, such as HIV-1, HIV-2, SIV, FIV and EIV, the native env proteins include gp41 and gp120. In some embodiments, the viral env proteins expressed by source cells described herein are encoded on a separate vector from the viral gag and pol genes, as has been previously described.

[0278] Illustrative examples of retroviral-derived env genes which can be employed include, but are not limited to: MLV envelopes, 10A1 envelope, BAEV, FeLV-B, RD114, SSAV, Ebola, Sendai, FPV (Fowl plague virus), and influenza virus envelopes. Similarly, genes encoding envelopes from RNA viruses (e.g., RNA virus families of Picornaviridae, Calciviridae, Astroviridae, Togaviridae, Flaviviridae, Coronaviridae, Paramyxoviridae, Rhabdoviridae, Filoviridae, Orthomyxoviridae, Bunyaviridae, Arenaviridae, Reoviridae, Birnaviridae, Retroviridae) as well as from the DNA viruses (families of Hepadnaviridae, Circoviridae, Parvoviridae, Papovaviridae, Adenoviridae, Herpesviridae, Poxyiridae, and Iridoviridae) may be utilized. Representative examples include, FeLV, VEE, HFVW, WDSV, SFV, Rabies, ALV, BIV, BLV, EBV, CAEV, SNV, ChTLV, STLV, MPMV, SMRV, RAV, FuSV, MH2, AEV, AMV, CT10, and EIAV.

[0279] In some embodiments, envelope proteins for display on a fusosome include, but are not limited to any of the following sources: Influenza A such as H1N1, H1N2, H3N2 and H5N1 (bird flu), Influenza B, Influenza C virus, Hepatitis A virus, Hepatitis B virus, Hepatitis C virus, Hepatitis D virus, Hepatitis E virus, Rotavirus, any virus of the Norwalk virus group, enteric adenoviruses, parvovirus, Dengue fever virus, Monkey pox, Mononegavirales, Lyssavirus such as rabies virus, Lagos bat virus, Mokola virus, Duvenhage virus, European bat virus 1 & 2 and Australian bat virus, Ephemerovirus, Vesiculovirus, Vesicular Stomatitis Virus (VSV), Herpesviruses such as Herpes simplex virus types 1 and 2, varicella zoster, cytomegalovirus, Epstein-Bar virus (EBV), human herpesviruses (HHV), human herpesvirus type 6 and 8, Human immunodeficiency virus (HIV), papilloma virus, murine gammaherpesvirus, Arenaviruses such as Argentine hemorrhagic fever virus, Bolivian hemorrhagic fever virus, Sabia-associated hemorrhagic fever virus, Venezuelan hemorrhagic fever virus, Lassa fever virus, Machupo virus, Lymphocytic choriomeningitis virus (LCMV), Bunyaviridiae such as Crimean-Congo hemorrhagic fever virus, Hantavirus, hemorrhagic fever with renal syndrome causing virus, Rift Valley fever virus, Filoviridae (filovirus) including Ebola hemorrhagic fever and Marburg hemorrhagic fever, Flaviviridae including Kaysanur Forest disease virus, Omsk hemorrhagic fever virus, Tick-borne encephalitis causing virus and Paramyxoviridae such as Hendra virus and Nipah virus, variola major and variola minor (smallpox), alphaviruses such as Venezuelan equine encephalitis virus, eastern equine encephalitis virus, western equine encephalitis virus, SARS-associated coronavirus (SARS-CoV), West Nile virus, any encephaliltis causing virus.

[0280] In some embodiments, a source cell described herein produces a fusosome, e.g., recombinant retrovirus, e.g., lentivirus, pseudotyped with the VSV-G glycoprotein.

[0281] A fusosome or pseudotyped virus generally has a modification to one or more of its envelope proteins, e.g., an envelope protein is substituted with an envelope protein from another virus. For example, HIV can be pseudotyped with vesicular stomatitis virus G-protein (VSV-G) envelope proteins, which allows HIV to infect a wider range of cells because HIV envelope proteins (encoded by the env gene) normally target the virus to CD4+ presenting cells. In some embodiments, lentiviral envelope proteins are pseudotyped with VSV-G. In one embodiment, source cells produce recombinant retrovirus, e.g., lentivirus, pseudotyped with the VSV-G envelope glycoprotein.

[0282] Furthermore, a fusogen or viral envelope protein can be modified or engineered to contain polypeptide sequences that allow the transduction vector to target and infect host cells outside its normal range or more specifically limit transduction to a cell or tissue type. For example, the fusogen or envelope protein can be joined in-frame with targeting sequences, such as receptor ligands, antibodies (using an antigen-binding portion of an antibody or a recombinant antibody-type molecule, such as a single chain antibody), and polypeptide moieties or modifications thereof (e.g., where a glycosylation site is present in the targeting sequence) that, when displayed on the transduction vector coat, facilitate directed delivery of the virion particle to a target cell of interest. Furthermore, envelope proteins can further comprise sequences that modulate cell function. Modulating cell function with a transducing vector may increase or decrease transduction efficiency for certain cell types in a mixed population of cells. For example, stem cells could be transduced more specifically with envelope sequences containing ligands or binding partners that bind specifically to stem cells, rather than other cell types that are found in the blood or bone marrow. Non-limiting examples are stem cell factor (SCF) and Flt-3 ligand. Other examples, include, e.g., antibodies (e.g., single-chain antibodies that are specific for a cell-type), and essentially any antigen (including receptors) that binds tissues as lung, liver, pancreas, heart, endothelial, smooth, breast, prostate, epithelial, vascular cancer, etc.

### Exemplary Fusogens

[0283] In some embodiments, the retroviral vector or VLP includes one or more fusogens, e.g., to facilitate the fusion of the retroviral vector or VLP to a membrane, e.g., a cell membrane.

[0284] In some embodiments, the retroviral vector or VLP comprises one or more fusogens on its envelope to target a specific cell or tissue type. Fusogens include without limitation protein based, lipid based, and chemical based fusogens. In some embodiments, the retroviral vector or VLP includes a first fusogen which is a protein fusogen and a second fusogen which is a lipid fusogen or chemical fusogen. The fusogen may bind a fusogen binding partner on a target cells' surface. In some embodiments, the retroviral vector or VLP comprising the fusogen will integrate the membrane into a lipid bilayer of a target cell.

[0285] In some embodiments, one or more of the fusogens described herein may be included in the retroviral vector or VLP.

### Protein Fusogens

[0286] In some embodiments, the fusogen is a protein fusogen, e.g., a mammalian protein or a homologue of a mammalian protein (e.g., having 50%, 60%, 70%, 80%, 85%, 90%, 95%, 96%, 97%, 98%, 99%, or greater identity), a non-mammalian protein such as a viral protein or a homologue of a viral protein (e.g., having 50%, 60%, 70%, 80%, 85%, 90%, 95%, 96%, 97%, 98%, 99%, or greater identity), a native protein or a derivative of a native protein, a synthetic protein, a fragment thereof, a variant thereof, a protein fusion comprising one or more of the fusogens or fragments, and any combination thereof.

[0287] In some embodiments, the fusogen results in mixing between lipids in the retroviral vector or VLP and lipids in the target cell. In some embodiments, the fusogen results in formation of one or more pores between the interior of the retroviral vector or VLP and the cytosol of the target cell.

### Mammalian Proteins

[0288] In some embodiments, the fusogen may include a mammalian protein, see Table 1. Examples of mammalian fusogens may include, but are not limited to, a SNARE family protein such as vSNAREs and tSNAREs, a syncytin protein such as Syncytin-1 (DOI: 10.1128/JVI.76.13.6442-6452.2002), and Syncytin-2, myomaker (biorxiv.org/content/early/2017/04/02/123158, doi.org/10.1101/123158, doi: 10.1096/fj.201600945R, doi:10.1038/nature12343), myomixer (www.nature.com/nature/journal/v499/n7458/full/nature12343.html, doi:10.1038/nature12343), myomerger (science.sciencemag.org/content/early/2017/04/05/science.aam9361, DOI: 10.1126/science.aam9361), FGFRL1 (fibroblast growth factor receptor-like 1), Minion (doi.org/10.1101/122697), an isoform of glyceraldehyde-3-phosphate dehydrogenase (GAPDH) (e.g., as disclosed in U.S. Pat. No. 6,099,857A), a gap junction protein such as connexin 43, connexin 40, connexin 45, connexin 32 or connexin 37 (e.g., as disclosed in US 2007/0224176, Hap2, any protein capable of inducing syncytium formation between heterologous cells (see Table 2), any protein with fusogen properties (see Table 3), a homologue thereof, a fragment thereof, a variant thereof, and a protein fusion comprising one or more proteins or fragments thereof. In some embodiments, the fusogen is encoded by a human endogenous retroviral element (hERV) found in the human genome. Additional exemplary fusogens are disclosed in U.S. Pat. No. 6,099,857A and US 2007/0224176, the entire contents of which are hereby incorporated by reference.

Table 1: Non-limiting examples of human and non-human fusogens.

TABLE 1
Non-limiting examples of human and non-human fusogens.
Human and Non-Human Fusogen Classes

| Fusogen Class | Uniprot Protein Family ID | # of sequences |
|---|---|---|
| EFF-AFF | PF14884 | 191 |
| SNARE | PF05739 | 5977 |
| DC-STAMP | PF07782 | 633 |
| ENV | PF00429 | 312 |

TABLE 2
Genes that encode proteins with fusogen properties.
Human genes with the gene ontology annotation of:
Syncytium formation by plasma membrane fusion proteins

| ID | Symbol |
|---|---|
| A0A024R0I0 | DYRK1B |
| A0A024R1N1 | MYH9 |
| A0A024R2D8 | CAV3 |
| A0A096LNV2 | FER1L5 |
| A0A096LPA8 | FER1L5 |
| A0A096LPB1 | FER1L5 |
| A0AVI2 | FER1L5 |
| A6NI61 | TMEM8C (myomaker) |
| B3KSL7 | — |
| B7ZLI3 | FER1L5 |
| H0YD14 | MYOF |
| O43184 | ADAM12 |
| O60242 | ADGRB3 |
| O60500 | NPHS1 |
| O95180 | CACNA1H |
| O95259 | KCNH1 |
| P04628 | WNT1 |
| P15172 | MYOD1 |
| P17655 | CAPN2 |
| P29475 | NOS1 |
| P35579 | MYH9 |
| P56539 | CAV3 |
| Q2NNQ7 | FER1L5 |
| Q4KMG0 | CDON |
| Q53GL0 | PLEKHO1 |
| Q5TCZ1 | SH3PXD2A |
| Q6YHK3 | CD109 |
| Q86V25 | VASH2 |
| Q99697 | PITX2 |
| Q9C0D5 | TANC1 |
| Q9H295 | DCSTAMP |
| Q9NZM1 | MYOF |
| Q9Y463 | DYRK1B |

TABLE 3
Human Fusogen Candidates

| Fusogen Class | Gene ID |
|---|---|
| SNARE | O15400 |
| | Q16623 |
| | K7EQB1 |
| | Q86Y82 |
| | E9PN33 |
| | Q96NA8 |
| | H3BT82 |
| | Q9UNK0 |
| | P32856 |
| | Q13190 |
| | O14662 |
| | P61266 |
| | O43752 |
| | O60499 |
| | Q13277 |
| | B7ZBM8 |
| | A0AVG3 |
| | Q12846 |
| DC-STAMP | Q9H295 |
| | Q5T1A1 |
| | Q5T197 |
| | E9PJX3 |
| | Q9BR26 |
| ENV | Q9UQF0 |
| | Q9N2K0 |
| | P60507 |
| | P60608 |
| | B6SEH9 |
| | P60508 |
| | B6SEH8 |
| | P61550 |
| | P60509 |
| | Q9N2J8 |
| Muscle Fusion (Myomaker) | H0Y5B2 |
| | H7C1S0 |
| | Q9HCN3 |
| | A6NDV4 |
| | K4DI83 |
| Muscle Fusion (Myomixer) | NP_001302423.1 |
| | ACT64390.1 |
| | XP_018884517.1 |
| | XP_017826615.1 |
| | XP_020012665.1 |
| | XP_017402927.1 |
| | XP_019498363.1 |
| | ELW65617.1 |
| | ERE90100.1 |
| | XP_017813001.1 |
| | XP_017733785.1 |
| | XP_017531750.1 |
| | XP_020142594.1 |
| | XP_019649987.1 |
| | XP_019805280.1 |
| | NP_001170939.1 |
| | NP_001170941.1 |
| | XP_019590171.1 |
| | XP_019062106.1 |
| | EPQ04443.1 |
| | EPY76709.1 |
| | XP_017652630.1 |
| | XP_017459263.1 |
| | OBS58441.1 |
| | XP_017459262.1 |
| | XP_017894180.1 |
| | XP_020746447.1 |
| | ELK00259.1 |
| | XP_019312826.1 |
| | XP_017200354.1 |
| | BAH40091.1 |
| HA | P03452 |
| | Q9Q0U6 |
| | P03460 |
| GAP JUNCTION | P36382 |
| | P17302 |
| | P36383 |
| | P08034 |
| | P35212 |
| Other | FGFRL1 |
| | GAPDH |

[0289] In some embodiments, the retroviral vector or VLP comprises a curvature-generating protein, e.g., Epsin1, dynamin, or a protein comprising a BAR domain. See, e.g., Kozlovet al, CurrOp StrucBio 2015, Zimmerberget al. Nat Rev 2006, Richard et al, Biochem J 2011.

### Non-Mammalian Proteins

### Viral Proteins

[0290] In some embodiments, the fusogen may include a non-mammalian protein, e.g., a viral protein. In some embodiments, a viral fusogen is a Class I viral membrane fusion protein, a Class II viral membrane protein, a Class III viral membrane fusion protein, a viral membrane glycoprotein, or other viral fusion proteins, or a homologue thereof, a fragment thereof, a variant thereof, or a protein fusion comprising one or more proteins or fragments thereof.

[0291] In some embodiments, Class I viral membrane fusion proteins include, but are not limited to, Baculovirus F protein, e.g., F proteins of the nucleopolyhedrovirus (NPV) genera, e.g., Spodoptera exigua MNPV (SeMNPV) F protein and Lymantria dispar MNPV (LdMNPV), and paramyxovirus F proteins.

[0292] In some embodiments, Class II viral membrane proteins include, but are not limited to, tick bone encephalitis E (TBEV E), Semliki Forest Virus E1/E2.

[0293] In some embodiments, Class III viral membrane fusion proteins include, but are not limited to, rhabdovirus G (e.g., fusogenic protein G of the Vesicular Stomatatis Virus (VSV-G)), herpesvirus glycoprotein B (e.g., Herpes Simplex virus 1 (HSV-1) gB)), Epstein Barr Virus glycoprotein B (EBV gB), thogotovirus G, baculovirus gp64 (e.g., Autographa California multiple NPV (AcMNPV) gp64), and Borna disease virus (BDV) glycoprotein (BDV G).

[0294] Examples of other viral fusogens, e.g., membrane glycoproteins and viral fusion proteins, include, but are not limited to: viral syncytia proteins such as influenza hemagglutinin (HA) or mutants, or fusion proteins thereof; human immunodeficiency virus type 1 envelope protein (HIV-1 ENV), gp120 from HIV binding LFA-1 to form lymphocyte syncytium, HIV gp41, HIV gp160, or HIV Trans-Activator of Transcription (TAT); viral glycoprotein VSV-G, viral glycoprotein from vesicular stomatitis virus of the Rhabdoviridae family; glycoproteins gB and gH-gL of the varicella-zoster virus (VZV); murine leukaemia virus (MLV)-10A1; Gibbon Ape Leukemia Virus glycoprotein (GaLV); type G glycoproteins in Rabies, Mokola, vesicular stomatitis virus and Togaviruses; murine hepatitis virus JHM surface projection protein; porcine respiratory coronavirus spike- and membrane glycoproteins; avian infectious bronchitis spike glycoprotein and its precursor; bovine enteric coronavirus spike protein; the F and H, HN or G genes of Measles virus; canine distemper virus, Newcastle disease virus, human parainfluenza virus 3, simian virus 41, Sendai virus and human respiratory syncytial virus; gH of human herpesvirus 1 and simian varicella virus, with the chaperone protein gL; human, bovine and cercopithicine herpesvirus gB; envelope glycoproteins of Friend murine leukaemia virus and Mason Pfizer monkey virus; mumps virus hemagglutinin neuraminidase, and glyoproteins F1 and F2; membrane glycoproteins from Venezuelan equine encephalomyelitis; paramyxovirus F protein; SIV gpl60 protein; Ebola virus G protein; or Sendai virus fusion protein, or a homologue thereof, a fragment thereof, a variant thereof, and a protein fusion comprising one or more proteins or fragments thereof.

[0295] Non-mammalian fusogens include viral fusogens, homologues thereof, fragments thereof, and fusion proteins comprising one or more proteins or fragments thereof. Viral fusogens include class I fusogens, class II fusogens, class III fusogens, and class IV fusogens. In embodiments, class I fusogens such as human immunodeficiency virus (HIV) gp41, have a characteristic postfusion conformation with a signature trimer of α-helical hairpins with a central coiled-coil structure. Class I viral fusion proteins include proteins having a central postfusion six-helix bundle. Class I viral fusion proteins include influenza HA, parainfluenza F, HIV Env, Ebola GP, hemagglutinins from orthomyxoviruses, F proteins from paramyxoviruses (e.g. Measles, (Katoh et al. BMC Biotechnology 2010, 10:37)), ENV proteins from retroviruses, and fusogens of filoviruses and coronaviruses. In embodiments, class II viral fusogens such as dengue E glycoprotein, have a structural signature of β-sheets forming an elongated ectodomain that refolds to result in a trimer of hairpins. In embodiments, the class II viral fusogen lacks the central coiled coil. Class II viral fusogen can be found in alphaviruses (e.g., E1 protein) and flaviviruses (e.g., E glycoproteins). Class II viral fusogens include fusogens from Semliki Forest virus, Sinbis, rubella virus, and dengue virus. In embodiments, class III viral fusogens such as the vesicular stomatitis virus G glycoprotein, combine structural signatures found in classes I and II. In embodiments, a class III viral fusogen comprises a helices (e.g., forming a six-helix bundle to fold back the protein as with class I viral fusogens), and β sheets with an amphiphilic fusion peptide at its end, reminiscent of class II viral fusogens. Class III viral fusogens can be found in rhabdoviruses and herpesviruses. In embodiments, class IV viral fusogens are fusion-associated small transmembrane (FAST) proteins (doi:10.1038/sj.emboj.7600767, Nesbitt, Rae L., “Targeted Intracellular Therapeutic Delivery Using Liposomes Formulated with Multifunctional FAST proteins” (2012). Electronic Thesis and Dissertation Repository. Paper 388), which are encoded by nonenveloped reoviruses. In embodiments, the class IV viral fusogens are sufficiently small that they do not form hairpins (doi: 10.1146/annurev-cellbio-101512-122422, doi:10.1016/j.devcel.2007.12.008).

[0296] In some embodiments the fusogen is a paramyxovirus fusogen. In some embodiments the fusogen is a Nipah virus protein F, a measles virus F protein, a tupaia paramyxovirus F protein, a paramyxovirus F protein, a Hendra virus F protein, a Henipavirus F protein, a Morbilivirus F protein, a respirovirus F protein, a Sendai virus F protein, a rubulavirus F protein, or an avulavirus F protein.

[0297] In some embodiments, the fusogen is a poxviridae fusogen.

[0298] Additional exemplary fusogens are disclosed in U.S. Pat. No. 9,695,446, US 2004/0028687, U.S. Pat. Nos. 6,416,997, 7,329,807, US 2017/0112773, US 2009/0202622, WO 2006/027202, and US 2004/0009604, the entire contents of all of which are hereby incorporated by reference.

[0299] In some embodiments, a fusogen described herein comprises an amino acid sequence of Table 4, or an amino acid sequence having at least 80%, 85%, 90%, 95%, 96%, 97%, 98%, or 99% sequence identity thereto, or an amino acid sequence having at least 80%, 85%, 90%, 95%, 96%, 97%, 98%, or 99% sequence identity to a portion of the sequence, e.g., a portion of 100, 200, 300, 400, 500, or 600 amino acids in length. For instance, in some embodiments, a fusogen described herein comprises an amino acid sequence having at least 80% identity to any amino acid sequence of Table 4. In some embodiments, a nucleic acid sequence described herein encodes an amino acid sequence of Table 4, or an amino acid sequence having at least 80%, 85%, 90%, 95%, 96%, 97%, 98%, or 99% sequence identity thereto, or an amino acid sequence having at least 80%, 85%, 90%, 95%, 96%, 97%, 98%, or 99% sequence identity to a portion of the sequence, e.g., a portion of 40, 50, 60, 80, 100, 200, 300, 400, 500, or 600 amino acids in length.

[0300] In some embodiments, a fusogen described herein comprises an amino acid sequence set forth in any one of SEQ ID NOS: 1-56, or an amino acid sequence having at least 80%, 85%, 90%, 95%, 96%, 97%, 98%, or 99% sequence identity thereto, or an amino acid sequence having at least 80%, 85%, 90%, 95%, 96%, 97%, 98%, or 99% sequence identity to a portion of the sequence, e.g., a portion of 100, 200, 300, 400, 500, or 600 amino acids in length. For instance, in some embodiments, a fusogen described herein comprises an amino acid sequence having at least 80% identity to an amino acid sequence set forth in any one of SEQ ID NOS: 1-56. In some embodiments, a nucleic acid sequence described herein encodes an amino acid sequence set forth in any one of SEQ ID NOS: 1-56, or an amino acid sequence having at least 80%, 85%, 90%, 95%, 96%, 97%, 98%, or 99% sequence identity thereto, or an amino acid sequence having at least 80%, 85%, 90%, 95%, 96%, 97%, 98%, or 99% sequence identity to a portion of the sequence, e.g., a portion of 40, 50, 60, 80, 100, 200, 300, 400, 500, or 600 amino acids in length.

TABLE 4
Paramyxovirus F sequence clusters. Column 1, Genbank ID includes the Genbank ID
of the whole genome sequence of the virus that is the centroid sequence of the
cluster. Column 2, Nucleotides of CDSprovides the nucleotides corresponding
to the CDSof the gene in the whole genome. Column 3, Full Gene Name, provides
the full name of the gene including Genbank ID, virus species, strain, and protein
name. Column 4, Sequence, provides the amino acid sequence of the gene. Column 5,
#Sequences/Cluster, provides the number of sequences
that cluster with this centroid sequence.

| | Nucleo- | | | | |
|---|---|---|---|---|---|
| Genbank | tides | | | #Sequences/ | SEQ |
| ID | of CDS | Full Gene Name | Sequence | Cluster | ID NO |
| KP317927 | 5630-7399 | gb: KP317927: | MIPQARTELNLGQITMELLIHRSSAIFLTLAINALYL | 993 | 1 |
| | | 5630-73pp\| | TSSQNITEEFYQSTCSAVSRGYLSALRTGWYTSVITI | | |
| | | Organism: | ELSNIKETKCNGTDTKVKLIKQELDKYKNAVTELQLL | | |
| | | Human respriatory | MQNTPAANNRARREAPQYMNYTINTTGSLNVSISKKR | | |
| | | syncytial virus\| | KRRFLGFLLGVGSAIASGIAVSKVLHLEGEVNKIKNA | | |
| | | Strain Name: | LLSTNKAVVSLSNGVSVLTSKVLDLKNYINNQLLPIV | | |
| | | Kilifi_9465_7_ | NQQSCRISNIETVIEFQQKNSRLLEITREFSVNAGVT | | |
| | | RSVB_2011\| | TPLSTYMLTNSELLSLINDMPITNDQKKLMSSNVQIV | | |
| | | Protein Name: | RQQSYSIMSIIKEEVLAYVVQLPIYGVIDTPCWKLHT | | |
| | | fusion glycoprotein\| | SPLCTTNIKEGSNICLTRTDRGWYCDNAGSVSFFPQA | | |
| | | Gene Symbol: F | DTCKVQSNRVFCDTMNSLTLPSEVSLCNTDIFNSKYD | | |
| | | | CKIMTSKTDISSSVITSLGAIVSCYGKTKCTASNKNR | | |
| | | | GIIKTFSNGCDYVSNKGVDTVSVGNTLYYVNKLEGKN | | |
| | | | LYVKGEPIINYYDPLVFPSDEFDASISQVNEKINQSL | | |
| | | | AFIRRSDELLHNVNTGKSTTNIMITAIIIVIIVVLLS | | |
| | | | LIAIGLLLYCKAKNTPVTLSKDQLSGINNIAFSK | | |
| AB524405 | 4556-6217 | gb: AB524405: | MDPKPSTSYLHAFPLIFVAISLVFMAGRASALDGRPL | 418 | 2 |
| | | 4556-6217\| | AAAGIVVTGDKAVNIYTSSQTGTIIIKLLPNMPKDKE | | |
| | | Organism: | QCAKSPLDAYNRTLTTLLAPLGDSIRRIQESVTTSGG | | |
| | | Newcastle disease | ERQERLVGAIIGGVALGVATAAQITAASALIQANQNA | | |
| | | virus\|Strain | ANILKLKESIAATNEAVHEVTSGLSQLAVAVGKMQQF | | |
| | | Name:Goose/ | VNDQFNKTAQEIDCIKITQQVGVELNLYLTELTTVFG | | |
| | | Alaska/415/91\| | PQITSPALTQLTIQALYNLAGGNMDYMLTKLGVGNNQ | | |
| | | Protein Name: | LSSLISSGLISGNPILYDSQTQLLGIQVTLPSVGNLN | | |
| | | fusion protein\| | NMRATYLETLSVSTNKGFASALVPKVVTQVGSVIEEL | | |
| | | Gene Symbol: F | DTSYCIETDLDLYCTRIVTFPMSPGIFSCLGGNTSAC | | |
| | | | MYSKTEGALTTPYMTLKGSVIANCKMTTCRCADPPGI | | |
| | | | ISQNYGEAVSLIDKKVCNILTLDGITLRLSGEFDATY | | |
| | | | QKNISIQDSQVVITGNLDISTELGNVNNSISNALDKL | | |
| | | | EESNSKLDKVNVRLTSTSALITYIVLTTIALICGIVS | | |
| | | | LVLACYIMYKQKAQQKTLLWLGNNTLDQMRATTKM | | |
| AF266286 | 4875-7247 | gb: AF266286: | MSIMGLKVNVSAIFMAVLLTLQTPTGQIHWGNLSKIG | 128 | 3 |
| | | 4875-7247\| | VVGIGSASYKVMTRSSHQSLVIKLMPNITLLNNCTRV | | |
| | | Organism: | EIAEYRRLLRTVLEPIRDALNAMTQNIRPVQSVASSR | | |
| | | Measles virus | RHKRFAGVVLAGAALGVATAAQITAGIALHQSMLNSQ | | |
| | | strain AIK-C\| | AIDNLRASLETTNQAIEAIRQAGQEMILAVQGVQDYI | | |
| | | Strain Name: | NNELIPSMNQLSCDLIGQKLGLKLLRYYTEILSLFGP | | |
| | | Measles virus | SLRDPISAEISIQALSYALGGDINKVLEKLGYSGGDL | | |
| | | strain Edmonston | LGILESRGIKARITHVDTESYFIVLSIAYPTLSEIKG | | |
| | | (AIK-C vaccine)\| | VIVHRLEGVSYNIGSQEWYTTVPKYVATQGYLISNFD | | |
| | | Protein Name: | ESSCTFMPEGTVCSQNALYPMSPLLQECLRGYTKSCA | | |
| | | fusion protein\| | RTLVSGSFGNRFILSQGNLIANCASILCKCYTTGTII | | |
| | | Gene Symbol: F | NQDPDKILTYIAADNCPVVEVNGVTIQVGSRRYPDAV | | |
| | | | YLHRIDLGPPILLERLDVGTNLGNAIAKLEDAKELLE | | |
| | | | SSDQILRSMKGLSSTCIVYILIAVCLGGLIGIPALIC | | |
| | | | CCRGRCNKKGEQVGMSRPGLKPDLTGTSKSYVRSL | | |
| AB503857 | 3068-4687 | gb: AB503857: | MSWKVVIIFSLLITPQHGLKESYLEESCSTITEGYLS | 125 | 4 |
| | | 3068-4687\| | VLRTGWYTNVFTLEVGDVENLTCSDGPSLIKTELDLT | | |
| | | Organism: Human | KSALRELKTVSADQLAREEQIEKPRQSRFVLGAIALG | | |
| | | metapneumovirus\| | VATAAAVTAGVAIAKTIRLESEVTAIKNALKTTNEAV | | |
| | | Strain Name: Jpn03- | STLGNGVRVLATAVRELKDFVSKNLTRAINKNKCDID | | |
| | | 1\|Protein Name: | DLKMAVSFSQFNRRFLNVVRQFSDNAGITPAISLDLM | | |
| | | fusion glycoprotein | TDAELARAVSNMPTSAGQIKLMLENRAMVRRKGFGIL | | |
| | | precursor\|Gene | IGVYGSSVIYMVQLPIFGVIDTPCWIVKAAPSCSEKK | | |
| | | Symbol: F | GNYACLLREDQGWYCQNAGSTVYYPNEKDCETRGDHV | | |
| | | | FCDTAAGINVAEQSKECNINISTTNYPCKVSTGRHPI | | |
| | | | SMVALSPLGALVACYKGVSCSIGSNRVGIIKQLNKGC | | |
| | | | SYITNQDADTVTIDNTVYQLSKVEGEQHVIKGRPVSS | | |
| | | | SFDPIKFPEDQFNVALDQVFENIENSQALVDQSNRIL | | |
| | | | SSAEKGNTGFIIVIILIAVLGSSMILVSIFIIIKKTK | | |
| | | | KPTGAPPELSGVTNNGFIPHS | | |
| EU277658 | 5078-6700 | gb: EU277658: | MIIIVITMILSLTPSSLCQIDITKLQSVGVLVNSPKG | 93 | 5 |
| | | 5078-6700\| | IKISQNFETRYLILSLIPKIEDSHSCGNQQIDQYKKL | | |
| | | Organism: Bovine | LDRLIIPLYDGLKLQKDVIVVNHESHNNTNLRTKRFF | | |
| | | parainfluenza virus | GEIIGTIAIGIATSAQITAAVALVEAKQARSDIDKLK | | |
| | | 3\|Strain Name: | EAIKDTNKAVQSIQSSVGNLIVAVKSVQDYVNNEIVP | | |
| | | Q5592\|Protein Name: | SITRLGCEAAGLQLGIALTQHYSELTNIFGDNIGTLG | | |
| | | fusion protein\| | EKGVKLQGIASLYRTNITEVFTTSTVDQYDIYDLLFT | | |
| | | Gene Symbol: F | ESIKMRVIDVDLSDYSITLQVRLPLLTKVSNTQIYKV | | |
| | | | DSISYNIQGKEWYIPLPHHIMTKGAFLGGADIKECIE | | |
| | | | SFSNYICPSDPGFILNHEMENCLSGNITQCPKTIVTS | | |
| | | | DIVPRYAFVDGGVIANCIPTTCTCNGIDNRINQSPDQ | | |
| | | | GIKIITYKECQIVGINGMLFKTNQEGTLAKYTFDNIK | | |
| | | | LNNSVALNPIDISLELNKAKSDLEESKRWIEKSNQKL | | |
| | | | DSIGSWHQSSVTIIIIIVMIVVLLIINAIIIMIMIRY | | |
| | | | LRDRNRHLNNKDSEPYVLTNRQ | | |
| AB040874 | 4546-6162 | gb: AB040874: | MKVFLVTCLGFAVFSSSVCVNINILQQIGYIKQQVRQ | 89 | 6 |
| | | 4546-6162\| | LSYYSQSSSSYIVVKLLPNIQPTDNSCEFKSVTQYNK | | |
| | | Orgamism: Mumps | TLSNLLLPIAENINNIASPSSGSRRHKRFAGIAIGIA | | |
| | | virus\|Strain Name: | ALGVATAAQVTAAVSLVQAQTNARAIAAMKNSIQATN | | |
| | | Miyaharal Protein | RAVFEVKEGTQRLAIAVQAIQDHINTIMNTQLNNMSC | | |
| | | Name: fusion | QILDNQLATSLGLYLTELTTVFQPQLINPALSPISIQ | | |
| | | protein\|Gene | ALRSLLGSMTPAVVQATLSTSISAAEILSAGLMEGQI | | |
| | | Symbol: F | VSVLLDEMQMIVKINIPTIVTQSNALVIDFYSISSFI | | |
| | | | NNQESIIQLPDRILEIGNEQWSYPAKNCKLTRHHIFC | | |
| | | | QYNEAERLSLESKLCLAGNISACVFSPIAGSYMRRFV | | |
| | | | ALDGTIVANCRSLTCLCKSPSYPIYQPDHHAVTTIDL | | |
| | | | TACQTLSLDGLDFSIVSLSNITYAENLTISLSQTINT | | |
| | | | QPIDISTELSKVNASLQNAVKYIKESNHQLQSVNVNS | | |
| | | | KIGAIIVAALVLSILSIIISLLFCCWAYVATKEIRRI | | |
| | | | NFKTNHINTISSSVDDLIRY | | |
| AB475097 | 4908-6923 | gb: AB475097: | MNPHEQTIPMHEKIPKRSKTQTHTQQDLPQQHSTKSA | 46 | 7 |
| | | 4908-6923\| | ESKTSRARHSITSAQRSTHYDPRTADWPDYYIMKRTR | | |
| | | Organism: Canine | SCKQASYRSDNIPAHGDHDGIIHHTPESVSQGAKSRL | | |
| | | distemper virus\| | KMGQSNAVKSGSQCTWLVLWCIGVASLFLCSKAQIHW | | |
| | | Strain Name: M25CR\| | NNLSTIGIIGTDSVHYKIMTRPSHQYLVIKLMPNVSL | | |
| | | Protein Name: fusion | IDNCTKAELDEYEKLLSSILEPINQALTLMTKNVKPL | | |
| | | protein\|Gene | QSVGSGRRQRRFAGVVLAGAALGVATAAQITAGIALH | | |
| | | Symbol: F | QSNLNAQAIQSLRTSLEQSNKAIEEIREATQETVIAV | | |
| | | | QGVQDYVNNELVPAMQHMSCELVGQRLGLKLLRYYTE | | |
| | | | LLSIFGPSLRDPISAEISIQALSYALGGEIHKILEKL | | |
| | | | GYSGNDMIAILESRGIKTKITHVDLPGKFIILSVSYP | | |
| | | | TLSEVKGVIVHRLEAVSYNIGSQEWYTTVPRYVATNG | | |
| | | | YLISNFDESSCVFVSESAICSQNSLYPMSPLLQQCIR | | |
| | | | GDTSSCARTLVSGTMGNKFILSKGNIVANCASILCKC | | |
| | | | YSTSTIINQSPDKLLTFIASDTCPLVEIDGVTIQVGS | | |
| | | | RQYPDMVYESKVALGPAISLERLDVGTNLGNALKKLD | | |
| | | | DAKVLIDSSNQILETVRRSSFNFGSLLSVPILSCTAL | | |
| | | | ALLLLICCCKRRYQQTHKQNTKVDPTFKPDLTGTSRS | | |
| | | | YVRSL | | |
| AJ849636 | 5526-7166 | gb: AJ849636: | MTRVAILTFLFLFPNAVACQIHWGNLSKIGIVGTGSA | 34 | 8 |
| | | 5526-7166\| | SYKVMTRPSHQTLVIKLMPNITAIDNCTKSEIAEYKR | | |
| | | Organism: Peste-des- | LLITVLKPVEDALSVITKNVRPIQTLTPGRRTRRFAG | | |
| | | petits-ruminants | AVLAGVALGVATAAQITAGVALHQSLMNSQAIESLKT | | |
| | | virus\|Strain Name: | SLEKSNQAIEEIRLANKETILAVQGVQDYINNELVPS | | |
| | | Turkey 2000\|Protein | VHRMSCELVGHKLGLKLLRYYTEILSIFGPSLRDPIA | | |
| | | Name: fusion | AEISIQALSYALGGDINRILDKLGYSGGDFLAILESK | | |
| | | protein\| Gene | GIKARVTYVDTRDYFIILSIAYPTLSEIKGVIVHKIE | | |
| | | Symbol: F | AITYNIGAQEWYTTIPKYVATQGYLISNFDETSCVFT | | |
| | | | PDGTVCSQNALYPMSPLLQECFQGSTKSCARTLVSGT | | |
| | | | ISNRFILSKGNLIANCASVLCKCYTTETVISQDPDKL | | |
| | | | LTVVASDKCPVVEVDGVTIQVGSREYPDSVYLHKIDL | | |
| | | | GPAISLEKLDVGTNLGNAVTRLENAKELLDASDQILK | | |
| | | | TVKGVPFGGNMYIALAACIGVSLGLVTLICCCKGRCK | | |
| | | | NKEVPISKINPGLKPDLTGTSKSYVRSL | | |
| AF017149 | 6618-8258 | gb: AF017149\| | MATQEVRLKCLLCGIIVLVLSLEGLGILHYEKLSKIG | 29 | 9 |
| | | Organism: Hendra | LVKGITRKYKIKSNPLTKDIVIKMIPNVSNVSKCTGT | | |
| | | virus\|Strain Name: | VMENYKSRLTGILSPIKGAIELYNNNTHDLVGDVKLA | | |
| | | UNKNOWN-AF017149\| | GVVMAGIAIGIATAAQITAGVALYEAMKNADNINKLK | | |
| | | Protein Name: | SSIESTNEAVVKLQETAEKTVYVLTALQDYINTNLVP | | |
| | | fusion\|Gene Symbol: | TIDQISCKQTELALDLALSKYLSDLLFVFGPNLQDPV | | |
| | | F | SNSMTIQAISQAFGGNYETLLRTLGYATEDFDDLLES | | |
| | | | DSIAGQIVYVDLSSYYIIVRVYFPILTEIQQAYVQEL | | |
| | | | LPVSFNNDNSEWISIVPNFVLIRNTLISNIEVKYCLI | | |
| | | | TKKSVICNQDYATPMTASVRECLTGSTDKCPRELVVS | | |
| | | | SHVPRFALSGGVLFANCISVTCQCQTTGRAISQSGEQ | | |
| | | | TLLMIDNTTCTTVVLGNIIISLGKYLGSINYNSESIA | | |
| | | | VGPPVYTDKVDISSQISSMNQSLQQSKDYIKEAQKIL | | |
| | | | DTVNPSLISMLSMIILYVLSIAALCIGLITFISFVIV | | |
| | | | EKKRGNYSRLDDRQVRPVSNGDLYYIGT | | |
| AB005795 | 4866-6563 | gb: AB005795: | MATYIQRVQCISALLSVVLTTLVSCQIPRDRLSNIGV | 23 | 10 |
| | | 4866-6563\| | IVDEGKSLKIAGSHESRYIVLSLVPGIDLENGCGTAQ | | |
| | | Organism: Sendai | VIQYKSLLNRLLIPLRDALDLQEALITVTNDTMTGAD | | |
| | | virus\|Strain Name: | VPQSRFFGAVIGTIALGVATSAQITAGIALAEAREAK | | |
| | | Ohita\|Protein Name: | RDIALIKESMTKTHKSIELLQNAVGEQILALKTLQDF | | |
| | | fusion protein\| | VNDEIKPAISELGCETAALRLGIKLTQHYSELLTAFG | | |
| | | Gene Symbol: F | SNFGTIGEKSLTLQALSSLYSANITEIMTTIRTGQSN | | |
| | | | IYDVIYTEQIKGTVIDVDLERYMVTLSVKIPILSEVP | | |
| | | | GVLIHKASSISYNIDGEEWYVTVPSHILSRASFLGGA | | |
| | | | NIADCVESRLTYICPRDPAQLIPDSQQKCILGDTTRC | | |
| | | | PVTKVVDNIIPKFAFVNGGVVANCIASTCTCGTGRRP | | |
| | | | ISQDRSKGVVFLTHDNCGLIGVNGIELYANRKGHDAT | | |
| | | | WGVQNLTVGPAIAIRPVDISLNLAAATDFLQDSRAEL | | |
| | | | EKARKILSEVGRWYNSGATLITIIVVMIVVLVVIIVI | | |
| | | | VIVLYRLRRSMLMSNPAGRISRDTYTLEPKIRHMYTN | | |
| | | | GGFDAMTEKR | | |
| AF457102 | 5088-6755 | gb: AF457102\| | MQKSEILFLVYSSLLLSSSLCQIPVEKLSNVGVIINE | 21 | 11 |
| | | Organism: Human | GKLLKIAGSYESRYIVLSLVPSIDLQDGCGTTQIIQY | | |
| | | parainfluenza virus | KNLLNRLLIPLKDALDLQESLITITNDTTVTNDNPQT | | |
| | | 1 strain Washington/ | RFFGAVIGTIALGVATAAQITAGIALAEAREARKDIA | | |
| | | 1964\|Strain Name: | LIKDSIVKTHNSVELIQRGIGEQIIALKTLQDFVNDE | | |
| | | Washington 1964\| | IRPAIGELRCETTALKLGIKLTQHYSELATAFSSNLG | | |
| | | Protein Name: F | TIGEKSLTLQALSSLYSANITEILSTTKKDKSDIYDI | | |
| | | glycoprotein\|Gene | IYTEQVKGTVIDVDLEKYMVTLLVKIPILSEIPGVLI | | |
| | | Symbol: F | YRASSISYNIEGEEWHVAIPNYIINKASSLGGADVTN | | |
| | | | CIESKLAYICPRDPTQLIPDNQQKCILGDVSKCPVTK | | |
| | | | VINNLVPKFAFINGGVVANCIASTCTCGTNRIPVNQD | | |
| | | | RSRGVTFLTYTNCGLIGINGIELYANKRGRDTTWGNQ | | |
| | | | IIKVGPAVSIRPVDISLNLASATNFLEESKTELMKAR | | |
| | | | AIISAVGGWHNTESTQIIMIIIVCILIIIICGILYYL | | |
| | | | YRVRRLLVMINSTHNSPVNAYTLESRMRNPYMGNNSN | | |
| AB910309 | 4951-6582 | gb: AB910309: | MGKIRVIIISSLLLSNITTAQVGWDNLTSIGVISTKQ | 12 | 12 |
| | | 4951-6582\| | YDYKITTLNTNQLMVIKMVPNISSIINCTKPELMKYR | | |
| | | Organism: Feline | ELVLGVIRPINESLELMNSYINMRAGSERFIGAVIAG | | |
| | | morbillivirus\|Strain | VALGVATAAQITSGIALHNSIMNKRQIQELRKALSTT | | |
| | | Name: SS1\|Protein | NKAIDEIRIAGERTLIAVQGVQDYINNIIIPMQDKLQ | | |
| | | Name: fusion | CDILSSQLAIALLRYYTNILTVFGPSIRDPVTSIISI | | |
| | | protein\|Gene Symbol: | QALSQAFNGNLQALLDGLGYTGRDLRDLLESRSITGQ | | |
| | | F | IIHADMTDLFLVLRINYPSITEMQGVTIYELNSITYH | | |
| | | | IGPEEWYTIMPNFIAVQGFLTSNFDERKCSITKSSIL | | |
| | | | CQQNSIYPMSTEMQRCIKGEIRFCPRSKAVGTLVNRF | | |
| | | | ILTKGNLMANCLGVICRCYSSGQIITQDPSKLITIIS | | |
| | | | QEECKEVGVDGIRIMVGPRKLPDVIFNARLEVGVPIS | | |
| | | | LSKLDVGTDLAIASAKLNNSKALLEQSDKILDSMSKL | | |
| | | | DSINSRITGLILAIMAIFIITVTIIWIIYKRCRNKDN | | |
| | | | KFSTSIEPLYIPPSYNSPHSVVKSI | | |
| KT071755 | 4310-6070 | gb: KT071755: | MIAALFISLFATCGALDNSVLAPVGIASAQEWQLAAY | 12 | 13 |
| | | 4310-6070\| | TNTLSGTIAVRFVPVLPGNLSTCAQATLAEYNKTVTN | | |
| | | Organism: Avian | ILGPLKENLETLLSEPTKTAARFVGAIIGTVALGVAT | | |
| | | paramyxovirus 2\| | SAQITAAVALNQAQENARNIWRLKESIRKTNEAVLEL | | |
| | | Strain Name: APMV- | KDGLASTAIALDKVQKFINEDIIPQIKEIDCQVVANK | | |
| | | 2/Procarduelis | LGVYLSLYLTELTTIFGAQITNPALTPLSYQALYNLC | | |
| | | nipalensis/China/ | GGDMGKLTELIGVKAKDINSLYEANLITGQVIGYDSE | | |
| | | Suiling/53/2013\| | SQIILIQVSYPSVSEVTGVRATELVTVSVTTPKGEGR | | |
| | | Protein Name: | AIAPKYVAQSRVVTEELDTSTCRFSKTTLYCRSIITR | | |
| | | fusion protein\|Gene | PLPPLIANCLNGLYQDCQYTTEIGALSSRFITVNGGI | | |
| | | Symbol: F | IANCRATICKCVNPPKIIVQSDASSLTVIDSAICKDV | | |
| | | | VLDNVQLRLEGKLSAQYFTNITIDLSQITTSGSLDIS | | |
| | | | SEIGSINNTVNKVEELIAESNAWLQAVNPHLVNNTSI | | |
| | | | IVLCVLAAIFVVWLVALTGCLAYYIKKSSATRMVGIG | | |
| | | | SSPAGNPYVAQSATKM | | |
| AY029299 | 4598-6265 | gb: AY029299\| | MGARLGPLAMAPGRYVIIFNLILLHRVVSLDNSRLLQ | 11 | 14 |
| | | Orgamism: Avian | QGIMSATEREIKVYTNSITGSIAVRLIPNLPQEVLKC | | |
| | | paramyxovirus 6\| | SAGQIKSYNDTLNRIFTPIKANLERLLATPSMLEDNQ | | |
| | | Strain Name: APMV- | NPAPEPRLIGAIIGTAALGLATAAQVTAALALNQAQD | | |
| | | 6/duck/Taiwan/Y1/ | NAKAILNLKESITKTNEAVLELKDATGQIAIALDKTQ | | |
| | | 98\|Protein Name: | RFINDNILPAINNLTCEVAGAKVGVELSLYLTELSTV | | |
| | | fusion protein\| | FGSQITNPALSTLSIQALMSLCGNDFNYLLNLMGAKH | | |
| | | Gene Symbol: F | SDLGALYEANLINGRIIQYDQASQIMVIQVSVPSISS | | |
| | | | ISGLRLTELFTLSIETPVGEGKAVVPQFVVESGQLLE | | |
| | | | EIDTQACTLTDTTAYCTIVRTKPLPELVAQCLRGDES | | |
| | | | RCQYTTGIGMLESRFGVFDGLVIANCKATICRCLAPE | | |
| | | | MIITQNKGLPLTVISQETCKRILIDGVTLQIEAQVSG | | |
| | | | SYSRNITVGNSQIAPSGPLDISSELGKVNQSLSNVED | | |
| | | | LIDQSNQLLNRVNPNIVNNTAIIVTIVLLVLLVLWCL | | |
| | | | ALTISILYVSKHAVRMIKTVPNPYVMQAKSPGSATQF | | |
| AY141760 | 5028-6665 | gb: AY141660\| | MTRITILQIILTLTLPVMCQVSFDNLEQVGVMFDKPK | 8 | 15 |
| | | Organism: Fer-de- | FLKITGPASTATMIIKLIPTLGTMESCGTSAVNEYKK | | |
| | | Lance paramyxovirus\| | TLDTILVPLRDTINKLSTDITVVEGTSNISNKREKRF | | |
| | | Strain Name: ATCC | VGIAIAVGAVALATSAQITAGIALSNTIKNAEAIESI | | |
| | | VR-895\|Protein Name: | KSSIQASNQAIQKVIDAQGRTVTVINGIQDHINSVIN | | |
| | | fusion protein F\| | PALNQLGCDVAKNTLAISLTQYFSKLSLLFGPNLRNP | | |
| | | Gene Symbol: F | VEQPLSVQAIAGLMDGDINAVVSQLGYTQSDLLDLLS | | |
| | | | TESIVGTVTAIDMVNYMIQIEMSFPQYITIPDTKVLE | | |
| | | | GHKITFNDKGSEWQTQVPSTIAVRDILIAGVDPDGCS | | |
| | | | ITSTSYICKNDPTYAMSEVLTNCFRGNTQECPRARIT | | |
| | | | STFATRFAIARSTVIANCVAAVCLCGDPGIPVVQKAE | | |
| | | | VTLTAMTLDQCSLITVDGLQIKPSKSIANVTANFGNI | | |
| | | | TLGPVVSVGDLDLSAELTKVQSDLKEAQDKLDESNAI | | |
| | | | LQGINNKILTAPTSIALIVVSVVVILLIIGMISWLVW | | |
| | | | LTKAVRRSNTRSERVTPSAYNNLGFIK | | |
| EU877976 | 4330-6410 | gb: EU877976: | MRLSRTILTLILGTLTGYLMGAHSTNVNEGPKSEGIR | 8 | 16 |
| | | 4330-6410\| | GDLIPGAGIFVTQVRQLQIYQQSGYHDLVIRLLPLLP | | |
| | | Organism: Avian | AELNDCQREVVTEYNNTVSQLLQPIKTNLDTLLADGG | | |
| | | paramyxovirus 4\| | TRDADIQPRFIGAIIATGALAVATVAEVTAAQALSQS | | |
| | | Strain Name: APMV- | KTNAQNILKLRDSIQATNQAVFEISQGLEATATVLSK | | |
| | | 4/KR/YJ/06\|Protein | LQTELNENIIPSLNNLSCAAMGNRLGVSLSLYLTLMT | | |
| | | Name: fusion | TLFGDQITNPVLTPISYSTLSAMAGGHIGPVMSKILA | | |
| | | protein\|Gene Symbol: | GSVTSQLGAEQLIASGLIQSQVVGYDSQYQLLVIRVN | | |
| | | F | LVRIQEVQNTRVVSLRTLAVNRDGGLYRAQVPPEVVE | | |
| | | | RSGIAERFYADDCVLTTTDYICSSIRSSRLNPELVKC | | |
| | | | LSGALDSCTFERESALLSTPFFVYNKAVVANCKAATC | | |
| | | | RCNKPPSIIAQYSASALVTITTDTCADLEIEGYRFNI | | |
| | | | QTESNSWVAPNFTVSTSQIVSVDPIDISSDIAKINSS | | |
| | | | IEAAREQLELSNQILSRINPRIVNDESLIAIIVTIVV | | |
| | | | LSLLVIGLIVVLGVMYKNLKKVQRAQAAMMMQQMSSS | | |
| | | | QPVTTKLGTPF | | |
| AB176531 | 4793-6448 | gb: AB176531: | MHHLHPMIVCIFVMYTGIVGSDAIAGDQLLNIGVIQS | 7 | 17 |
| | | 4793-6448\| | KIRSLMYYTDGGASFIVVKLLPNLPPSNGTCNITSLD | | |
| | | Organism: Human | AYNVTLFKLLTPLIENLSKISTVTDTKTRQKRFAGVV | | |
| | | parainfluenza virus | VGLAALGVATAAQITAAVAIVKANANAAAINNLASSI | | |
| | | 2\|Strain Name: | QSTNKAVSDVIDASRTIATAVQAIQDRINGAIVNGIT | | |
| | | Nishio\|Protein Name: | SASCRAHDALIGSILNLYLTELTTIFHNQITNPALTP | | |
| | | fusion protein\| | LSIQALRILLGSTLPIVIESKLNTNFNTAELLSSGLL | | |
| | | Gene Symbol: F | TGQIISISPMYMQMLIQINVPTFIMQPGAKVIDLIAI | | |
| | | | SANHKLQEVVVQVPNRILEYANELQNYPANDCVVTPN | | |
| | | | SVFCRYNEGSPIPESQYQCLRGNLNSCTFTPIIGNFL | | |
| | | | KRFAFANGVLYANCKSLLCRCADPPHVVSQDDTQGIS | | |
| | | | IIDIKRCSEMMLDTFSFRITSTFNATYVTDFSMINAN | | |
| | | | IVHLSPLDLSNQINSINKSLKSAEDWIADSNFFANQA | | |
| | | | RTAKTLYSLSAIALILSVITLVVVGLLIAYIIKLVSQ | | |
| | | | IHQFRSLAATTMFHRENPAFFSKNNHGNIYGIS | | |
| BK005918 | 4677-6302 | gb: BK005918\| | MPQQQVAHTCVMLWGIISTVSGINTEALSQYGVVVTN | 7 | 18 |
| | | Organism: Porcine | VRQLTYYTQAGSTYLAVRLLPSLASPDQSCALHSIIN | | |
| | | rubulavirus\|Strain | YNATLQAILSPIAENLNLISTALREQHRKKRFAGVAI | | |
| | | Name: UNKNOWN- | GLTALGVATAAQATAAVALVRANKNAEKVEQLSQALG | | |
| | | BK005918\|Protein | ETNAAISDLIDATKNLGFAVQAIQNQINTAILPQIHN | | |
| | | Name: fusion | LSCQVIDAQLGNILSLYLTELTTVFQPQLTNPALSPL | | |
| | | protein\|Gene Symbol: | TIQALRAVLGTTLPALLSEKLKSNIPLGDLMSSGLLK | | |
| | | F | GQLVGLNLQNMLMIIELYIPTLSTHSTAKVLDLVTIS | | |
| | | | SHVNGREVEIQVPNRVLELGSEVLGYGGSECALTMSH | | |
| | | | ILCPFNDARVLSTDMKYCLQGNITHCIFSPVVGSFLR | | |
| | | | RFALVNGVVIANCADMSCVCFDPQEIIYQNFQEPTTV | | |
| | | | IDIKKCGKVQLDTLTFTISTFANRTYGPPAYVPPDNI | | |
| | | | IQSEPLDISGNLIAVNNSLSSALNHLATSEILRNEQI | | |
| | | | WTSSLGISTIVALVIIGILIICLVVTWAALWALLKEV | | |
| | | | RGLNSAVNSQLSSYVMGDKFIRY | | |
| KC237063 | 4530-6185 | gb: KC237063: | MGTRIQFLMVSCLLAGTGSLDPAALMQIGVIPTNVRQ | 7 | 19 |
| | | 4530-6185\| | LMYYTEASSAFIVVKLMPTIDSPISGCNITSISSYNA | | |
| | | Orgamins: | TMTKLLQPIGENLETIRYQLIPTRRRRRFVGVVIGLA | | |
| | | Parainfluenza virus | ALGVATAAQVTAAVALVKANKNAAAILNLKNAIQKTN | | |
| | | 5\|Strain Name: | AAVADVVQATQSLGTAVQAVQDHINSVVSPAITAANC | | |
| | | 08-1990\|Protein | KAQDAIIGSILNLYLTELTTIFHNQITNPALSPITIQ | | |
| | | Name: fusion | ALRILLGSTLPTVVRKSFNTQISAAELLSSGLLTGQI | | |
| | | protein\|Gene Symbol: | VGLDLTYMQMVIKIELPTLTVQPATQIIDLVTISAFI | | |
| | | F\|Segment: 4 | NNREVMAQLPTRIIVTGSLIQAYPASQCTITPNTVYC | | |
| | | | RYNDAQVLSDDTMACLQGNLTRCTFSPVVGSFLTRFV | | |
| | | | LFDGIVYANCRSMLCKCMQPAAVILQPSSSPVTVIDM | | |
| | | | HKCVSLQLDNLRFTITQLANITYNSTIKLETSQILPI | | |
| | | | DPLDISQNLAAVNKSLSDALQHLAQSDTYLSAITSAT | | |
| | | | TTSVLSIIAICLGSLGLILIILISVVVWKLLTIVAAN | | |
| | | | RNRMENFVYHNSAFHHSRSDLSEKNQPATLGTR | | |
| AY729016 | 5862-7523 | gb: AY729016: | MIPGRIFLVLLVIFNTKPIHPNTLTEKFYESTCSVET | 6 | 20 |
| | | 5862-7523\| | AGYKSALRTGWHMTVMSIKLSQINIESCKSSNSLLAH | | |
| | | Organism: Murine | ELAIYSSAVDELRTLSSNALKSKRKKRFLGLILGLGA | | |
| | | pneumonia virus\| | AVTAGVALAKTVQLESEIALIRDAVRNTNEAVVSLTN | | |
| | | Strain Name: 15; | GMSVLAKVVDDLKNFISKELLPKINRVSCDVHDITAV | | |
| | | ATCC VR-25\|Protein | IRFQQLNKRLLEVSREFSSNAGLTHTVSSFMLTDREL | | |
| | | Name: fusion | TSIVGGMAVSAGQKEIMLSSKAIMRRNGLAILSSVNA | | |
| | | glycoprotein | DTLVYVIQLPLFGVMDTDCWVIRSSIDCHNIADKYAC | | |
| | | precursor\|Gene | LARADNGWYCHNAGSLSYFPSPTDCEIHNGYAFCDTL | | |
| | | Symbol: F | KSLTVPVTSRECNSNMYTTNYDCKISTSKTYVSTAVL | | |
| | | | TTMGCLVSCYGHNSCTVINNDKGIIRTLPDGCHYISN | | |
| | | | KGVDRVQVGNTVYYLSKEVGKSIVVRGEPLVLKYDPL | | |
| | | | SFPDDKFDVAIRDVEHSINQTRTFLKASDQLLDLSEN | | |
| | | | RENKNLNKSYILTTLLFVVMLIIIMAVIGFILYKVLK | | |
| | | | MIRDNKLKSKSTPGLTVLS | | |
| AB543336 | 5174-6805 | gb: AB543336: | MGVKGLSLIMIGLLISPITNLDITHLMNLGTVPTAIR | 5 | 21 |
| | | 5174-6805\| | SLVYYTYTKPSYLTVDLIPNLKNLDQNCNYSSLNYYN | | |
| | | Organism: Human | KTALSLIQPIADNINRLTKPITSSEIQSRFFGAVIGT | | |
| | | parainfluenza | IALGVATAAQVTAAIGLAKAQENAKLILTLKKAATET | | |
| | | virus 4a\|Strain | NEAVRDLANSNKIVVKMISAIQNQINTIIQPAIDQIN | | |
| | | Name: M-25\|Protein | CQIKDLQVANILNLYLTEITTVFHNQLTNPALESISI | | |
| | | Name: fusion | QALKSLLGPTLPEVLSKLDLNNISAASVMASGLIKGQ | | |
| | | protein\|Gene Symbol: | IIAVDIPTMTLVLMVQIPSISPLRQAKIIDLTSITIH | | |
| | | F | TNSQEVQAVVPARFLEIGSEILGFDGSVCQITKDTIF | | |
| | | | CPYNDAYELPIQQKRCLQGQTRDCVFTPVAGTFPRRF | | |
| | | | LTTYGTIVANCRDLVCSCLRPPQIIYQPDENPVTIID | | |
| | | | KDLCTTLTLDSITIEIQKSINSTFRREVVLESTQVRS | | |
| | | | LTPLDLSTDLNQYNQLLKSAEDHIQRSTDYLNSINPS | | |
| | | | IVNNNAIIILIILCILLILTVTICIIWLKYLTKEVKN | | |
| | | | VARNQRLNRDADLFYKIPSQIPVPR | | |
| AF298895 | 4834-6450 | gb: AF298895\| | MRIALTAVIVSIHFDLAFPMNKNSLLSVGLVHKSVKN | 5 | 22 |
| | | Organism\| Tioman | LYFYSQGSPSYIVVKLVPTLGNVPGNCTLNSLVRYKS | | |
| | | virus\|Strain Name: | TVSSLLSPLAENLEYLQKTLTVSRGGRRRRFAGVAIG | | |
| | | UNKNOWN-AF298895\| | LAALGVAAAAQATAAVALVEARQNAAQIQSLSEAIQN | | |
| | | Protein Name: | TNLAVNELKTAIGASATAIQAIQTQINEVINPAINRL | | |
| | | fusion protein\|Gene | SCEILDAQLASMLNLYLIHLTTVFQNQLTNPALTPLS | | |
| | | Symbol: F | IQSLQSLLQGTSSVLTNITSSSKLALNDALVTGLITG | | |
| | | | QVVGLNMTSLQIVIAAYVPSVAKLSNAVVHNFIRITT | | |
| | | | SVNGTEVIIQSPTIIMEQNEVMYDLKTGHCTESDLNI | | |
| | | | YCPYVDAQLLSPGMTNCINGRLNDCTFSKVVGSFPTR | | |
| | | | FAAVEGAILANCKYLQCNCLTPPYIITPLNGEMISMI | | |
| | | | DLSKCQRLDLGTIVFDINNPVNVTFNGNYRADVGQMI | | |
| | | | VTNPLDISAELNQINTSLSNAQGFLSKSDAWLHVSQW | | |
| | | | VTNSGTIFIILIIGLIVGIVYMIINTYVVVQIIKEIN | | |
| | | | RMRTSDRAHLLKGSISSIST | | |
| FJ215863 | 4499-6130 | gb: FJ215863: | MGQISVYLINSVLLLLVYPVNSIDNTLIAPIGVASAN | 5 | 23 |
| | | 4499-6130\| | EWQLAAYTTSLSGTIAVRFLPVLPDNMTTCLRETITT | | |
| | | Organism: Avian | YNNTVNNILGPLKSNLDALLSSETYPQTRLIGAVIGS | | |
| | | paramyxovirus 8\| | IALGVATSAQITAAVALKQAQDNARNILALKEALSKT | | |
| | | Strain Name: goose/ | NEAVKELSSGLQQTAIALGKIQSFVNEEILPSINQLS | | |
| | | Delaware/1053/76\| | CEVTANKLGVYLSLYLTELTTIFGAQLTNPALTSLSY | | |
| | | Protein Name: fusion | QALYNLCGGNMAMLTQKIGIKQQDVNSLYEAGLITGQ | | |
| | | protein\|Gene | VIGYDSQYQLLVIQVNYPSISEVTGVRATELVTVSVT | | |
| | | Symbol: F | TDKGEGKAIVPQFVAESRVTIEELDVASCKFSSTTLY | | |
| | | | CRQVNTRALPPLVASCLRGNYDDCQYTTEIGALSSRY | | |
| | | | ITLDGGVLVNCKSIVCRCLNPSKIISQNTNAAVTYVD | | |
| | | | ATICKTIQLDDIQLQLEGSLSSVYARNISIEISQVTT | | |
| | | | SGSLDISSEIGNINNTVNRVEDLIHQSEEWLAKVNPH | | |
| | | | IVNNTTLIVLCVLSALAVIWLAVLTAIIIYLRTKLKT | | |
| | | | ISALAVTNTIQSNPYVNQTKRESKF | | |
| JN689227 | 4689-6521 | gb: JN689227: | MKLSVVYTTLLVSTFYSDLARSQLALSELTKIGVIPG | 5 | 24 |
| | | 4689-6521\| | RSYDLKISTQASYQYMVVKLIPNLTGLNNCTNGTIEA | | |
| | | Organism: Tailam | YKKMLNRLLSPIDAALRKMKDAVNDKPPESVGNVKFW | | |
| | | virus\|Strain Name: | GAVIGGVALGVATSAQITAGVALHNSIQNANAILALK | | |
| | | TL8K\|Protein Name: | DSIRQSNKAIQELQTAMSTTVVVLNALQDQINNQLVP | | |
| | | fusion protein\|Gene | AINSLGCQVVANTLGLKLNQYFSEISLVFGPNLRDPT | | |
| | | Symbol: F | SETLSIQALSRAFNGDFDSMLSKLKYDDSDFLDLLES | | |
| | | | DSIRGRIIDVSLSDYLITIQIEYPALLSIKDAVIQTF | | |
| | | | NLISYNTRGTEWISIFPKQLLVRGTYISNIDISQCVI | | |
| | | | AATSIICKSDTSTPISSATWSCATGNITNCARTRVVN | | |
| | | | AHVPRFALYGGVVFANCAPVVCKCQDPLYSINQEPKV | | |
| | | | TNVMVDVDACKEMYLDGLYITLGKTQISRAMYAEDVS | | |
| | | | LGGPISVDPIDLGNEINSINSAINRSEEHLNHANELL | | |
| | | | DKVNPRIVNVKTFGVMIGLLVLVVLWCVITLVWLICL | | |
| | | | TKQLARTAYAGSMGSRASTVNSLSGFVG | | |
| JX957409 | 4831-6615 | gb: JX857409: | MQVTTLRPAIILSIALLVTGQVPRDKLANLGIIIKDS | 5 | 25 |
| | | 4831-6615\| | KALKIAGSYENRYIVLSLVPTIDNVNGCGSIQIAKYK | | |
| | | Organism: Procine | EMLERLLIPIKDALDLQESLIVIDNETVNNNYSPQYR | | |
| | | parainfluenza virus | FVGAIIGTIALGVATAAQVTAGVALMEAREAKRDISM | | |
| | | 1\|Strain Name: | LKEAIEKTQNSIEKLQNSAGEQILALKMLQDYVNGEI | | |
| | | S206N\|Protein Name: | KPAIEELGCETAALKLGIALTQHYTELTNAFGSNLGS | | |
| | | fusion protein\|Gene | IGEKSLTLQALSSLYKTNITNILTATNLGKTDIYDII | | |
| | | Symbol: F | YAEQVKGRVIDVDLKRYMVTISVKIPILSEIPGVLIY | | |
| | | | EVSSISYNIDGAEWYAAVPDHILSKSAYIGGADISDC | | |
| | | | IESRLTYICPQDPAQIIADNQQQCFFGHLDKCPITKV | | |
| | | | IDNLVPKFAFINGGVVANCIASTCTCGEERIQVSQDR | | |
| | | | NKGVTFLTHNNCGLIGINGIEFHANKKGSDATWNVSP | | |
| | | | IGVGPAVSLRPVDISLQIVAATNFLNSSRKDLMKAKE | | |
| | | | ILNQVGNLKDLTTITIINIVIIIILLICVIGLGILYH | | |
| | | | QLRSALGMRDKMSVLNNSSYSLEPRTAQVQVIKPTSF | | |
| | | | MG | | |
| AY640317 | 2932-4571 | gb: AY640317: | MDVRICLLLFLISNPSSCIQETYNEESCSTVTRGYKS | 4 | 26 |
| | | 2932-4571\| | VLRTGWYTNVFNLEIGNVENITCNDGPSLIDTELVLT | | |
| | | Organism: Avian | KNALRELKTVSADQVAKESRLSSPRRRRFVLGAIALG | | |
| | | metapneumovirus\| | VATAAAVTAGVALAKTIRLEGEVKAIKNALRNTNEAV | | |
| | | Strain Name: LAHA\| | STLGNGVRVLATAVNDLKEFISKKLTPAINQNKCNIA | | |
| | | Protein Name: F\| | DIKMAISFGQNNRRFLNVVRQFSDSAGITSAVSLDLM | | |
| | | Gene Symbol: F | TDDELVRAINRMPTSSGQISLMLNNRAMVRRKGFGIL | | |
| | | | IGVYDGTVVYMVQLPIFGVIETPCWRVVAAPLCRKRR | | |
| | | | GNYACILREDQGWYCTNAGSTAYYPNKDDCEVRDDYV | | |
| | | | FCDTAAGINVALEVDQCNYNISTSKYPCKVSTGRHPV | | |
| | | | SMVALTPLGGLVSCYESVSCSIGSNKVGIIKQLGKGC | | |
| | | | THIPNNEADTITIDNTVYQLSKVVGEQRTIKGAPVVN | | |
| | | | NFNPILFPVDQFNVALDQVFESIDRSQDLIDKSNDLL | | |
| | | | GADAKSKAGIAIAIVVLVILGIFFLLAVIYYCSRVRK | | |
| | | | TKPKHDYPATTGHSSMAYVS | | |
| KU636513 | 4641-6498 | gb: KU646513: | MARFSWEIFRLSTILLIAQTCQGSIDGRLTLAAGIVP | 4 | 27 |
| | | 4641-6498\| | VGDRPISIYTSSQTGIIVVKLIPNLPDNKKDCAKQSL | | |
| | | Organism: Avian | QSYNETLSRILTPLATAMSAIRGNSTTQVRENRLVGA | | |
| | | paramyxovirus 13 | IIGSVALGVATAAQITAATALIQANQNAANIARLANS | | |
| | | goose/Kazakhstan/ | IAKTNEAVTDLTEGLGTLAIGVGKLQDYVNEQFNNTA | | |
| | | 5751/2013\|Strain | VAIDCLTLESRLGIQLSLYLTELMGVFGNQLTSPALT | | |
| | | Name: APMV-13/ | PITIQALYNLAGGNLNALLSRLGASETQLGSLINSGL | | |
| | | white fronted | IKGMPIMYDDANKLLAVQVELPSIGKLNGARSTLLET | | |
| | | goose/Northern | LAVDTTRGPSSPIIPSAVIEIGGAMEELDLSPCITTD | | |
| | | Kazakhstan/5751/ | LDMFCTKIISYPLSQSTLSCLNGNLSDCVFSRSEGVL | | |
| | | 2013\|Protein Name: | STPYMTIKGKIVANCKQVICRCMDPPQILSQNYGEAL | | |
| | | fusion protein\| | LLIDENTCRSLELSGVILKLAGTYESEYTRNLTVDPS | | |
| | | Gene Symbol: F | QVIITGPLDISAELSKVNQSIDSAKENIAESNKFLSQ | | |
| | | | VNVKLLSSSAMITYIVATVVCLIIAITGCVIGIYTLT | | |
| | | | KLKSQQKTLLWLGNNAEMHGSRSKTSF | | |
| AF326114 | 4818-6482 | gb: AF326114\| | MMPRVLGMIVLYLTHSQILCINRNTLYQIGLIHRSVK | 3 | 28 |
| | | Organism: Menangle | KVNFYSQGSPSYIVVKLVPTLAAIPPNCSIKSLQRYK | | |
| | | virus\|Strain Name: | ETVTSLVQPISDNLGYLQDKLVTGQSRRRRRFAGVAI | | |
| | | UNKNOWN-AF326114\| | GLAALGVAAAAQATAAVALVETRENAGKIQALSESIQ | | |
| | | Protein Name: fusion | NTNQAVHSLKTALGFSATAIQAIQNQVNEVINPAINK | | |
| | | protein\|Gene | LSCEVLDSQLASMLNLYLIHLTTVFQTQLTNPALTPL | | |
| | | Symbol: F | SIQALTSVLQGTSGVLMNSTNSTLTQPIDLLATGLIT | | |
| | | | GQIISVNMTSLQLIIATFMPSIAELPNAVLHSFFRIT | | |
| | | | TSVNLTEVMIQSPEFIMEQNGVFYDFNTAHCQLGDNN | | |
| | | | VYCPYIDAARLSSMMTNCINGNLGECVFSRVIGSFPS | | |
| | | | RFVSLNGAILANCKFMRCNCLSPEKIITPLDGEMISL | | |
| | | | IDLRVCQKLTLGTITFEISQPVNVSFQGGFVANAGQI | | |
| | | | IVTNPFDISAELGQINNSLNDAQGFLDQSNNWLKVSG | | |
| | | | WINNSGSLFIAGIVVIGLIVLCIVIIIYINVQIIREV | | |
| | | | NRLRSFIYRDYVLDHDKAPYSPESSSPHRKSLKTVS | | |
| GU206351 | 5441-7468 | gb: GU206351: | MLQLPLTILLSILSAHQSLCLDNSKLIHAGIMSTTER | 3 | 29 |
| | | 5441-7468\| | EVNVYAQSITGSIVVRLIPNIPSNHKSCATSQIKLYN | | |
| | | Organism: Avian | DTLTRLLTPIKANLEGLISAVSQDQSQNSGKRKKRFV | | |
| | | paramyxovirus 5\| | GAVIGAAALGLATAAQVTATVALNQAQENARNILRLK | | |
| | | Strain Name: | NSIQKTNEAVMELKDAVGQTAVAIDKTQAFINNQILP | | |
| | | budgerigar/ | AISNLSCEVLGNKIGVQLSLYLTELTTVFGNQLTNPA | | |
| | | Kunitachi/74/Protein | LTTLSLQALYNLCGDDFNYLINLLNAKNRNLASLYEA | | |
| | | Name: fusion | NLIQGRITQYDSMNQLLIIQVQIPSISTVSGMRVTEL | | |
| | | protein\|Gene | FTLSVDTPIGEGKALVPKYVLSSGRIMEEVDLSSCAI | | |
| | | Symbol: F | TSTSVFCSSIISRPLPLETINCLNGNVTQCQFTANTG | | |
| | | | TLESRYAVIGGLVIANCKAIVCRCLNPPGVIAQNLGL | | |
| | | | PITIISSNTCQRINLEQITLSLGNSILSTYSANLSQV | | |
| | | | EMNLAPSNPLDISVELNRVNTSLSKVESLIKESNSIL | | |
| | | | DSVNPQILNVKTVIILAVIIGLIVVWCFILTCLIVRG | | |
| | | | FMLLVKQQKFKGLSVQNNPYVSNNSH | | |
| JQ001776 | 6129-8166 | gb: JQ001776: | MSNKRTTVLIIISYTLFYLNNAAIVGFDFDKLNKIGV | 3 | 30 |
| | | 6129-8166\| | VQGRVLNYKIKGDPMTKDLVLKFIPNIVNITECVREP | | |
| | | Organism: Cedar | LSRYNETVRRLLLPIHNMLGLYLNNTNAKMTGLMIAG | | |
| | | virus\|Strain Name: | VIMGGIAIGIATAAQITAGFALYEAKKNTENIQKLTD | | |
| | | CG1a\|Protein Name: | SIMKTQDSIDKLTDSVGTSILILNKLQTYINNQLVPN | | |
| | | fusion glycoprotein\| | LELLSCRQNKIEFDLMLTKYLVDLMTVIGPNINNPVN | | |
| | | Gene Symbol: F | KDMTIQSLSLLFDGNYDIMMSELGYTPQDFLDLIESK | | |
| | | | SITGQIIYVDMENLYVVIRTYLPTLIEVPDAQIYEFN | | |
| | | | KITMSSNGGEYLSTIPNFILIRGNYMSNIDVATCYMT | | |
| | | | KASVICNQDYSLPMSQNLRSCYQGETEYCPVEAVIAS | | |
| | | | HSPRFALTNGVIFANCINTICRCQDNGKTITQNINQF | | |
| | | | VSMIDNSTCNDVMVDKFTIKVGKYMGRKDINNINIQI | | |
| | | | GPQIIIDKVDLSNEINKMNQSLKDSIFYLREAKRILD | | |
| | | | SVNISLISPSVQLFLIIISVLSFIILLIIIVYLYCKS | | |
| | | | KHSYKYNKFIDDPDYYNDYKRERINGKASKSNNIYYV | | |
| | | | GD | | |
| LC168749 | 4869-7235 | gb: LC168749: | MGILFAALLAMTNPHLATGQIHWGNLSKIGVVGTGSA | 2 | 31 |
| | | 4869-7235\| | SYKVMTQSSHQSLVIKLMPNVTAIDNCTKTEIMEYKR | | |
| | | Organism: Rinderpest | LLGTVLKPIREALNAITKNIKPIQSSTTSRRHKRFAG | | |
| | | morbillivirus\| | VVLAGAALGVATAAQITAGIALHQSMMNSQAIESLKA | | |
| | | Strain Name: Lv\| | SLETTNQAIEEIRQAGQEMVLAVQGVQDYINNELVPA | | |
| | | Protein Name: F | MGQLSCEIVGQKLGLKLLRYYTEILSLFGPSLRDPVS | | |
| | | protein\|Gene Symbol: | AELSIQALSYALGGDINKILEKLGYSGSDLLAILESK | | |
| | | F | GIKAKITYVDIESYFIVLSIAYPSLSEIKGVIVHRLE | | |
| | | | SVSYNIGSQEWYTTVPRYVATQGYLISNFDDTPCAFT | | |
| | | | PEGTICSQNALYPMSPLLQECFRGSTRSCARTLVSGS | | |
| | | | IGNRFILSKGNLIANCASILCKCYTTGSIISQDPDKI | | |
| | | | LTYIAADQCPVVEVGGVTIQVGSREYSDAVYLHEIDL | | |
| | | | GPPISLEKLDVGTNLWNAVTKLEKAKDLLDSSDLILE | | |
| | | | NIKGVSVTNTGYILVGVGLIAVVGILIITCCCKKRRS | | |
| | | | DNKVSTMVLNPGLRPDLTGTSKSYVRSL | | |
| LC187310 | 6250-7860 | gb: LC187310: | MTRTRLLFLLTCYIPGAVSLDNSILAPAGIISASERQ | 2 | 32 |
| | | 6250-7860\| | IAIYTQTLQGTIALRFIPVLPQNLSSCAKDTLESYNS | | |
| | | Organism: Avian | TVSNLLLPIAENLNALLKDADKPSQRIIGAIIGSVAL | | |
| | | paramyxovirus 10\| | GVATTAQVTAALAMTQAQQNARNIWKLKESIKNTNQA | | |
| | | Strain Name: rAPMV- | VLELKDGLQQSAIALDKVQSFINSEILPQINQLGCEV | | |
| | | 10-FI324/YmHA\| | AANKLGIFLSLYLTEITTVFKNQITNPALSTLSYQAL | | |
| | | Protein Name: fusion | YNLCGGNMAALTKQIGIKDTEINSLYEAELITGQVIG | | |
| | | protein\|Gene | YDSADQILLIQVSYPSVSRVQGVRAVELLTVSVATPK | | |
| | | Symbol: F | GEGKAIAPSFIAQSNIIAEELDTQPCKFSKTTLYCRQ | | |
| | | | VNTRTLPVRVANCLKGKYNDCQYTTEIGALASRYVTI | | |
| | | | TNGVVANCRSIICRCLDPEGIVAQNSDAAITVIDRST | | |
| | | | CKLIQLGDITLRLEGKLSSSYSKNITIDISQVTTSGS | | |
| | | | LDISSELGSINNTITKVEDLISKSNDWLSKVNPTLIS | | |
| | | | NDTIIALCVIAGIVVIWLVIITILSYYILIKLKNVAL | | |
| | | | LSTMPKKDLNPYVNNTKF | | |
| NC_005283 | 5277-6935 | gb: NC_005283: | MAASNGGVMYQSFLTIIILVIMTEGQIHWGNLSKIGI | 2 | 33 |
| | | 5277-6935\| | VGTGSASYKVMTRPNHQYLVIKLMPNVTMIDNCTRTE | | |
| | | Organism: Dolphin | VTEYRKLLKTVLEPVKNALTVITKNIKPIQSLTTSRR | | |
| | | morbillivirus\| | SKRFAGVVLAGVALGVATAAQITAGVALHQSIMNSQS | | |
| | | Strain Name: | IDNLRTSLEKSNQAIEEIRQASQETVLAVQGVQDFIN | | |
| | | UNKNOWN-NC_005283\| | NELIPSMHQLSCEMLGQKLGLKLLRYYTEILSIFGPS | | |
| | | Protein Name: fusion | LRDPVSAEISIQALSYALGGDINKILEKLGYSGADLL | | |
| | | protein\|Gene | AILESRGIKAKVTHVDLEGYFIVLSIAYPTLSEVKGV | | |
| | | Symbol: F | IVHKLEAVSYNLGSQEWYTTLPKYVATNGYLISNFDE | | |
| | | | SSCAFMSEVTICSQNALYPMSPLLQQCLRGSTASCAR | | |
| | | | SLVSGTIGNRFILSKGNLIANCASVLCKCYSTGTIIS | | |
| | | | QDPDKLLTFVAADKCPLVEVDGITIQVGSREYPDSVY | | |
| | | | VSRIDLGPAISLEKLDVGTNLGSALTKLDNAKDLLDS | | |
| | | | SNQILENVRRSSFGGAMYIGILVCAGALVILCVLVYC | | |
| | | | CRRHCRKRVQTPPKATPGLKPDLTGTTKSYVRSL | | |
| NC_005339 | 5374-7602 | gb: NC_005339: | MSNYFPARVIIIVSLITAVSCQISFQNLSTIGVFKFK | 2 | 34 |
| | | 5374-7602\| | EYDYRVSGDYNEQFLAIKMVPNVTGVENCTASLIDEY | | |
| | | Organism: Mossman | RHVIYNLLQPINTTLTASTSNVDPYAGNKKFFGAVIA | | |
| | | virus\|Strain Name: | GVALGVATAAQVTAGVALYEARQNAAAIAEIKESLHY | | |
| | | UNKNOWN-NC_005339\| | THKAIESLQISQKQTVVAIQGIQDQINTNIIPQINAL | | |
| | | Protein Name: | TCEIANQRLRLMLLQYYTEMLSSFGPIIQDPLSGHIT | | |
| | | fusion protein\| | VQALSQAAGGNITGLMRELGYSSKDLRYILSVNGISA | | |
| | | Gene Symbol: F | NIIDADPEIGSIILRIRYPSMIKIPDVAVMELSYLAY | | |
| | | | HAAGGDWLTVGPRFILKRGYSLSNLDITSCTIGEDFL | | |
| | | | LCSKDVSSPMSLATQSCLRGDTQMCSRTAVQDREAPR | | |
| | | | FLLLQGNLIVNCMSVNCKCEDPEETITQDPAYPLMVL | | |
| | | | GSDTCKIHYIDGIRIKLGKVQLPPITVLNTLSLGPIV | | |
| | | | VLNPIDVSNQLSLVETTVKESEDHLKNAIGALRSQSR | | |
| | | | VGGVGIVAIVGLIIATVSLVVLVISGCCLVKYFSRTA | | |
| | | | TLESSLTTIEHGPTLAPKSGPIIPTYINPVYRHD | | |
| NC_007454 | 4635-6384 | gb: NC_007454: | MKPVALIYLTILAFTVKVRSQLALSDLTKIGIIPAKS | 2 | 35 |
| | | 4635-6384\| | YELKISTQAAQQLMVIKLIPNVNGLTNCTIPVMDSYK | | |
| | | Organism: J-virus\| | KMLDRILKPIDDALNHVKNAIQDKQGDGVPGVRFWGA | | |
| | | Strain Name: | IIGGVALGVATSAQITAGVALHNSIQNANAILQLKES | | |
| | | UNKNOWN-NC_007454\| | IRNSNKAIEELQAGLQSTVLVINALQDQINSQLVPAI | | |
| | | Protein Name: fusion | NTLGCSVIANTLGLRLNQYFSEISLVFGPNLRDPTSQ | | |
| | | protein\|Gene Symbol: | TLSIQAIAKAFNGDFDSMMKKMHYTDSDFLDLLESDS | | |
| | | F | IRGRIISVSLEDYLIIIQIDYPGLTTIPNSVVQTFNL | | |
| | | | ITYNYKGTEWESIFPRELLIRGSYISNIDISQCVGTS | | |
| | | | KSMICKSDTSTTISPATWACATGNLTSCARTRVVNSH | | |
| | | | STRFALSGGVLFANCAPIACRCQDPQYSINQEPKTTN | | |
| | | | VMVTSEDCKELYIDGFYLTLGKKWILDRAMYAEDVAL | | |
| | | | GGSVSVDPIDIGNELNSINESINKSHEYLDKANELLE | | |
| | | | QVNPNIVNVSSFSFILVISILLIIWFIVTLVWLIYLT | | |
| | | | KHMNFIVGKVAMGSRSSTVNSLSGFVG | | |
| NC_009489 | 4620-6500 | gb: NC_009489: | MRSSLFLVLTLLVPFAHSIDSITLEQYGTVITSVRSL | 2 | 36 |
| | | 4620-6500\| | AYFLETNPTYISVRLMPAIQTDSSHCSYHSIENYNLT | | |
| | | Organism: Mapuera | LTKLLLPLQENLHQITDSLSSRRRKKRFAGVAVGLAA | | |
| | | virus\|Strain Name: | LGVATAAQVTAAIAVVKAKENSAKIAQLTSAISETNR | | |
| | | BeAnn 370284\|Protein | AVQDLIEGSKQLAVAVQAIQDQINNVIQPQLTNLSCQ | | |
| | | Name: fusion | VADAQVGTILNMYLTELTTVFHPQITNSALTPITIQA | | |
| | | protein\|Gene Symbol: | LRSLLGSTLPQVVTSTIKTDVPLQDLLTSGLLKGQIV | | |
| | | F | YLDLQSMIMVVSVSVPTIALHSMAKVYTLKAISAHVN | | |
| | | | NAEVQMQVPSRVMELGSEIMGYDIDQCEETSRYLFCP | | |
| | | | YNGGSILSATMKMCLNGNISQCVFTPIYGSFLQRFVL | | |
| | | | VDGVIVANCRDMTCACKSPSKIITQPDSLPVTIIDST | | |
| | | | SCSNLVLDTLELPIISINNATYRPVQYVGPNQIIFSQ | | |
| | | | PLDLLSQLGKINSSLSDAIEHLAKSDEILEQIQWDSP | | |
| | | | QGYTLIALTSVLAFVVVAIVGLLISTRYLIFEIRRIN | | |
| | | | TTLTQQLSSYVLSNKIIQY | | |
| NC_017937 | 4534-6330 | gb: NC_017937: | MAEQEKTPLRYKILLIIIVINHYNITNVFGQIHLANL | 2 | 37 |
| | | 4534-6330\| | SSIGVFVTKTLDYRTTSDPTEQLLVINMLPNISNIQD | | |
| | | Organism: Nariva | CAQGVVNEYKHLISSLLTPINDTLDLITSNINPYSGR | | |
| | | virus\|Strain Name: | NKLFGEIIAGAALTVATSAQITAGVALYEARQNAKDI | | |
| | | UNKNOWN-NC_017937\| | AAIKESLGYAYKAIDKLTTATREITVVINELQDQINN | | |
| | | Protein Name: fusion | RLIPRINDLACEVWATRLQAMLLQYYAEIFSVIGPNL | | |
| | | protein\|Gene | QDPLSGKISIQALARAAGGNIKLMVDELNYSGQDLSR | | |
| | | Symbol: F | LVKVGAIKGQIIDADPSLGVVIIKMRYPNIIKIPNVA | | |
| | | | ISELSYVSYSSDGQDWITTGPNYIVTRGYSIANIQTS | | |
| | | | SCSVGDDFVLCDRDMTYPMSQVTQDCLRGNIALCSRM | | |
| | | | VVRDREAPRYLILQGNMVANCMSITCRCEEPESEIYQ | | |
| | | | SPDQPLTLLTRDTCDTHVVDGIRIRLGVRKLPTISVI | | |
| | | | NNITLGPIITTDPIDVSNQLNAVVSTIDQSAELLHQA | | |
| | | | QRVLSERARGARDHILATAAIVICVVLAVLILVLLIG | | |
| | | | LVYLYRTQNEILVKTTMLEQVPTFAPKSFPMESQIYS | | |
| | | | GKTNKGYDPAE | | |
| NC_025256 | 6865-8853 | gb: NC_025256: | MKKKTDNPTISKRGHNHSRGIKSRALLRETDNYSNGL | 2 | 38 |
| | | 6865-8853\| | IVENLVRNCHHPSKNNLNYTKTQKRDSTIPYRVEERK | | |
| | | Organism: Bat | GHYPKIKHLIDKSYKHIKRGKRRNGHNGNIITIILLL | | |
| | | Paramyxovirus | ILILKTQMSEGAIHYETLSKIGLIKGITREYKVKGTP | | |
| | | Eid_hel/GH-M74a/ | SSKDIVIKLIPNVTGLNKCTNISMENYKEQLDKILIP | | |
| | | GHA/2009\|Strain | INNIIELYANSTKSAPGNARFAGVIIAGVALGVAAAA | | |
| | | Name: BatPV/ | QITAGIALHEARQNAERINLLKDSISATNNAVAELQE | | |
| | | Eid_hel/GH-M74a/ | ATGGIVNVITGMQDYINTNLVPQIDKLQCSQIKTALD | | |
| | | GHA/2009\|Protein | ISLSQYYSEILTVFGPNLQNPVTTSMSIQAISQSFGG | | |
| | | Name: fusion | NIDLLLNLLGYTANDLLDLLESKSITGQITYINLEHY | | |
| | | protein\|Gene | FMVIRVYYPIMTTISNAYVQELIKISFNVDGSEWVSL | | |
| | | Symbol: F | VPSYILIRNSYLSNIDISECLITKNSVICRHDFAMPM | | |
| | | | SYTLKECLTGDTEKCPREAVVTSYVPRFAISGGVIYA | | |
| | | | NCLSTTCQCYQTGKVIAQDGSQTLMMIDNQTCSIVRI | | |
| | | | EEILISTGKYLGSQEYNTMHVSVGNPVFTDKLDITSQ | | |
| | | | ISNINQSIEQSKFYLDKSKAILDKINLNLIGSVPISI | | |
| | | | LFIIAILSLILSIITFVIVMIIVRRYNKYTPLINSDP | | |
| | | | SSRRSTIQDVYIIPNPGEHSIRSAARSIDRDRD | | |
| NC_025347 | 4471-6386 | gb: NC_025347: | MRVRPLIIILVLLVLLWLNILPVIGLDNSKIAQAGII | 2 | 39 |
| | | 4471-6386\| | SAQEYAVNVYSQSNEAYIALRTVPYIPPHNLSCFQDL | | |
| | | Organism: Avian | INTYNTTIQNIFSPIQDQITSITSASTLPSSRFAGLV | | |
| | | paramyxovirus 7\| | VGAIALGVATSAQITAAVALTKAQQNAQEIIRLRDSI | | |
| | | Strain Name: APMV- | QNTINAVNDITVGLSSIGVALSKVQNYLNDVINPALQ | | |
| | | 7/dove/Tennessee/ | NLSCQVSALNLGIQLNLYLTEITTIFGPQITNPSLTP | | |
| | | 4/75\|Protein Name: | LSIQALYTLAGDNLMQFLTRYGYGETSVSSILESGLI | | |
| | | fusion protein\| | SAQIVSFDKQTGIAILYVTLPSIATLSGSRVTKLMSV | | |
| | | Gene Symbol: F | SVQTGVGEGSAIVPSYVIQQGTVIEEFIPDSCIFTRS | | |
| | | | DVYCTQLYSKLLPDSILQCLQGSMADCQFTRSLGSFA | | |
| | | | NRFMTVAGGVIANCQTVLCRCYNPVMIIPQNNGIAVT | | |
| | | | LIDGSLCKELELEGIRLTMADPVFASYSRDLIINGNQ | | |
| | | | FAPSDALDISSELGQLNNSISSATDNLQKAQESLNKS | | |
| | | | IIPAATSSWLIILLFVLVSISLVIGCISIYFIYKHST | | |
| | | | TNRSRNLSSDIISNPYIQKAN | | |
| NC_025348 | 4790-6570 | gb: NC_025348: | MAPCVLFLSSLLLISTISPSHGINQPALRRIGAIVSS | 2 | 40 |
| | | 4790-6570\| | VKQLKFYSKTKPNYIIVKLLPTINLSKSNCNLTSINR | | |
| | | Organism: Tuhoko | YKESVIEIIKPLADNIDNLNQKLLPKNRRKRMAGVAI | | |
| | | virus 2\|Strain | GLAALGVAAAAQATAAVALVEARKNTQMIQSLADSIQ | | |
| | | Name: UNKNOWN- | DTNAAVQAVNIGLQNSAVAIQAIQNQINNVINPALDR | | |
| | | NC_025348\|Protein | LNCEVLDAQIASILNLYLIKSVTIFQNQLTNPALQQL | | |
| | | Name: fusion | SIQMLSIVMQDTAKILGNFTIGDKFDQHDLLGSGLIT | | |
| | | protein\|Gene | GQVVGVNLTNLQLIIAAFIPSIAPLPQAYIIDLISIT | | |
| | | Symbol: F | ISVNDTEAVIQIPERIMEHGSSIYQFGGKQCVYGQFS | | |
| | | | AYCPFSDAVLMTQDLQLCMKGNIEHCIFSSVLGSFPN | | |
| | | | RFASVDGVFYANCKYMSCACSDPLQVIHQDDSVNLMV | | |
| | | | IDSSVCRSLTLGHVTFPIIAFSNVSYQMKTNISIEQM | | |
| | | | IVTSPLDLSTELKQINNSVNIANTFLDSSNRALKTSI | | |
| | | | FGTSSQIILIVLLIFTCLLILYVIFLTYIIKILIKEV | | |
| | | | KRLRDGNSRTGSKLSFINPDV | | |
| NC_025350 | 4663-6428 | gb: NC_025350: | MLWLTILIALVGNHESTCMNINFLQSLGQINSQKRFL | 2 | 41 |
| | | 4663-6428\| | NFYTQQPPSYMVIRLVPTLQLSANNCTLGSIVRYRNA | | |
| | | Organism: Tuhoko | IKELIQPMDENLRWLSSNLIPQRRGKRFAGVAVGLAA | | |
| | | virus 3\|Strain Name: | LGVAVAAQATAAVALVEARANAEKIASMSQSIQETNK | | |
| | | UNLNOWN-NC_025350\| | AVTSLSQAVSASGIAIQAIQNEINNVIHPILNQVQCD | | |
| | | Protein Name: fusion | VLDARVGNILNLYLIKVTTIFQNQLTNPALQRLSTQA | | |
| | | protein\|Gene | LSMLMQSTSSYLRNLSSSESAINADLSMTNLIEAQIV | | |
| | | Symbol: F | GINMTNLQLVLAVFIPSIARLNGALLYDFISITISSN | | |
| | | | QTEVMLQIPHRVLEIGNSLYTFEGTQCEMTKLNAYCL | | |
| | | | YSDAIPVTESLRDCMNGLFSQCGFVRIIGSFANRFAS | | |
| | | | VNGVIYANCKHLTCSCLQPDEIITQDTNVPLTIIDTK | | |
| | | | RCTKISLGHLTFTIREYANVTYSLRTEIANSQITVVS | | |
| | | | PLDLSSQLTTINNSLADATNHIMNSDRILDRLNSGLY | | |
| | | | SKWVIIFLICASIVSLIGLVFLGFLIRGLILELRSKH | | |
| | | | RSNLNKASTYSIDSSIGLT | | |
| NC_025352 | 5950-8712 | gb: NC_025352: | MALNKNMFSSLFLGYLLVYATTVQSSIHYDSLSKVGV | 2 | 42 |
| | | 5950-8712\| | IKGLTYNYKIKGSPSTKLMVVKLIPNIDSVKNCTQKQ | | |
| | | Organism: Mojiang | YDEYKNLVRKALEPVKMAIDTMLNNVKSGNNKYRFAG | | |
| | | virus\|Strain Name: | AIMAGVALGVATAATVTAGIALHRSNENAQAIANMKS | | |
| | | Tongguan 1\|Protein | AIQNTNEAVKQLQLANKQTLAVIDTIRGEINNNIIPV | | |
| | | Name: fusion | INQLSCDTIGLSVGIRLTQYYSEIITAFGPALQNPVN | | |
| | | protein\|Gene | TRITIQAISSVFNGNFDELLKIMGYTSGDLYEILHSE | | |
| | | Symbol: F | LIRGNIIDVDVDAGYIALEIEFPNLTLVPNAVVQELM | | |
| | | | PISYNIDGDEWVTLVPRFVLTRTTLLSNIDTSRCTIT | | |
| | | | DSSVICDNDYALPMSHELIGCLQGDTSKCAREKVVSS | | |
| | | | YVPKFALSDGLVYANCLNTICRCMDTDTPISQSLGAT | | |
| | | | VSLLDNKRCSVYQVGDVLISVGSYLGDGEYNADNVEL | | |
| | | | GPPIVIDKIDIGNQLAGINQTLQEAEDYIEKSEEFLK | | |
| | | | GVNPSIITLGSMVVLYIFMILIAIVSVIALVLSIKLT | | |
| | | | VKGNVVRQQFTYTQHVPSMENINYVSH | | |
| NC_025363 | 4622-6262 | gb: NC_025363: | MAIPVPSSTALMIFNILVSLAPASALDGRLLLGAGIV | 2 | 43 |
| | | 4622-6262\| | PTGDRQVNVYTSSQTGIIALKLLPNLPKDKENCAEVS | | |
| | | Organism: Avian | IRSYNETLTRILTPLAQSMAAIRGNSTVSTRGREPRL | | |
| | | paramyxovirus 12\| | VGAIIGGVALGVATAAQITAATALIQANQNAENIARL | | |
| | | Strain Name: | AKGLAATNEAVTDLTKGVGSLAIGVGKLQDYVNEQFN | | |
| | | Wigeion/Italy/ | RTGEAIECLTIESRVGVQLSLYLTEVIGVFGDQITSP | | |
| | | 3920_1/2005\|Protein | ALSDISIQALYNLAGGNLNVLLQKMGIEGTQLGSLIN | | |
| | | Name: fusion | SGLIKGRPIMYDDGNKILGIQVTLPSVGRINGARATL | | |
| | | protein\|Gene | LEAIAVATPKGNASPLIPRAVISVGSLVEELDMTPCV | | |
| | | Symbol: F | LTPTDIFCTRILSYPLSDSLTTCLKGNLSSCVFSRTE | | |
| | | | GALSTPYVSVHGKIVANCKSVVCRCVEPQQIISQNYG | | |
| | | | EALSLIDESLCRILELNGVILKMDGQFTSEYTKNITI | | |
| | | | DPVQVIISGPIDISSELSQVNQSLDSALENIKESNSY | | |
| | | | LSKVNVKLISSSAMITYIVITVICLILTFVALVLGIY | | |
| | | | SYTKIRSQQKTLIWMGNNIARSKEGNRF | | |
| NC_025373 | 4617-6582 | gb: NC_025373: | MASPMVPLLIITVVPALISSQSANIDKLIQAGIIMGS | 2 | 44 |
| | | 4617-6582\| | GKELHIYQESGSLDLYLRLLPVIPSNLSHCQSEVITQ | | |
| | | Organism: Avian | YNSTVTRLLSPIAKNLNHLLQPRPSGRLFGAVIGSIA | | |
| | | paramyxovirus 3\| | LGVATSAQISAAIALVRAQQNANDILALKAAIQSSNE | | |
| | | Strain Name: | AIKQLTYGQEKQLLAISKIQKAVNEQVIPALTALDCA | | |
| | | turkey/Wisconsin/ | VLGNKLAAQLNLYLIEMTTIFGDQINNPVLTPIPLSY | | |
| | | 68\|Protein Name: | LLRLTGSELNDVLLQQTRSSLSLIHLVSKGLLSGQII | | |
| | | fusion protein\| | GYDPSVQGIIIRIGLIRTQRIDRSLVFXPYVLPITIS | | |
| | | Gene Symbol: F | SNIATPIIPDCVVKKGVIIEGMLKSNCIELERDIICK | | |
| | | | TINTYQITKETRACLQGNITMCKYQQSRTQLSTPFIT | | |
| | | | YNGVVIANCDLVSCRCIRPPMIITQVKGYPLTIINRN | | |
| | | | LCTELSVDNLILNIETNHNFSLNPTIIDSQSRLIATS | | |
| | | | PLEIDALIQDAQHHAAAALLKVEESNAHLLRVTGLGS | | |
| | | | SSWHIILILTLLVCTIAWLIGLSIYVCRIKNDDSTDK | | |
| | | | EPTTQSSNRGIGVGSIQYMT | | |
| NC_025386 | 5548-7206 | gb: NC_025386: | MNPLNQTLIAKVLGFLLLSSSFTVGQIGFENLTRIGV | 2 | 45 |
| | | 5548-7206\| | HQVKQYGYKLAHYNSHQLLLIRMIPTVNGTHNCTHQV | | |
| | | Organism: Salem | ITRYREMVREIITPIKGALDIMKKAVSPDLVGARIFG | | |
| | | virus\|Strain Name: | AIVAGAALGIATSAQITAGVALHRTKLNGQEISKLKE | | |
| | | UNKNOWN-NC_025386\| | AVSLTNEAVEQLQYSQGKSILAIQGIQDFINFNVVPL | | |
| | | Protein Name\|fusion | LEEHTCGIAKLHLEMALMEYFQKLILVFGPNLRDPIG | | |
| | | protein\|Gene Symbol: | STIGIQALATLFQNNMFEVSLRLGYAGDDLEDVLQSN | | |
| | | F | SIRANIIEAEPDSGFIVLAIRYPTLTLVEDQVITELA | | |
| | | | HITFNDGPQEWVATIPQFVTYRGLVLANIDVSTCTFT | | |
| | | | ERNVICARDQTYPMIIDLQLCMRGNIAKCGRTRVTGS | | |
| | | | TASRFLLKDGNMYANCIATMCRCMSSSSIINQEPSHL | | |
| | | | TTLIVKETCSEVMIDTIRITLGERKHPPIDYQTTITL | | |
| | | | GQPIALAPLDVGTELANAVSYLNKSKVLLEHSNEVLS | | |
| | | | SVSTAHTSLTATIVLGIVVGGLAILIVVMFLFLEAQV | | |
| | | | IKVQRAMMLCPITNHGYLPNEDLLTRGHSIPTIG | | |
| NC_025390 | 4805-6460 | gb: NC_025390: | MGYFHLLLILTAIAISAHLCYTTTLDGRKLLGAGIVI | 2 | 46 |
| | | 4805-6460\| | TEEKQVRVYTAAQSGTIVLRSFRVVSLDRYSCMESTI | | |
| | | Organism: Avian | ESYNKTVYNILAPLGDAIRRIQASGVSVERIREGRIF | | |
| | | paramyxovirus 9\| | GAILGGVALGVATAAQITAAIALIQANENAKNILRIK | | |
| | | Strain Name: duck/ | DSITKTNEAVRDVTNGVSQLTIAVGKLQDFVNKEFNK | | |
| | | New York/22/1978\| | TTEAINCVQAAQQLGVELSLYLTEITTVFGPQITSPA | | |
| | | Protein Name: | LSKLTIQALYNLAGVSLDVLLGRLGADNSQLSSLVSS | | |
| | | fusion protein\| | GLITGQPILYDSESQILALQVSLPSISDLRGVRATYL | | |
| | | Gene Symbol: F | DTLAVNTAAGLASAMIPKVVIQSNNIVEELDTTACIA | | |
| | | | AEADLYCTRITTFPIASAVSACILGDVSQCLYSKTNG | | |
| | | | VLTTPYVAVKGKIVANCKHVTCRCVDPTSIISQNYGE | | |
| | | | AATLIDDQLCKVINLDGVSIQLSGTFESTYVRNVSIS | | |
| | | | ANKVIVSSSIDISNELENVNSSLSSALEKLDESDAAL | | |
| | | | SKVNVHLTSTSAMATYIVLTVIALILGFVGLGLGCFA | | |
| | | | MIKVKSQAKTLLWLGAHADRSYILQSKPAQSST | | |
| NC_025403 | 4826-6649 | gb: NC_025403: | MWIMIILSLFQIIPGVTPINSKVLTQLGVITKHTRQL | 2 | 47 |
| | | 4826-6649\| | KFYSHSTPSYLVVKLVPTINTESTVCNFTSLSRYKDS | | |
| | | Organism: Achimota | VRELITPLAKNIDNLNSILTIPKRRKRMAGVVIGLAA | | |
| | | virus 1\|Strain Name: | LGVAAAAQATAAVALIEAKKNTEQIQALSESIQNTNK | | |
| | | UNKNOWN-NC_025403\| | AVSSIEKGLSSAAIAVQAIQNQINNVINPALTALDCG | | |
| | | Protein Name: fusion | VTDAQLGNILNLYLIKTLTVFQKQITNPALQPLSIQA | | |
| | | protein\|Gene Symbol: | LNIIMQETSSVLRNFTKTDEIEHTDLLTSGLITGQVV | | |
| | | F | GVNLTNLQLIIAAFIPSIAPLNQAYILDFIRITVNIN | | |
| | | | NSESMIQIPERIMEHGISLYQFGGDQCTFSDWSAYCP | | |
| | | | YSDATLMAPGLQNCFRGQAADCVFSTVMGSFPNRFVS | | |
| | | | VQGVFYVNCKFIRCACTQPQRLITQDDSLSLTQIDAK | | |
| | | | TCRMLTLGFVQFSINEYANVTYSFKNNVTAGQLIMTN | | |
| | | | PIDLSTEIKQMNDSVDEAARYIEKSNAALNKLMYGGR | | |
| | | | SDIVTTVLLVGFILLVVYVIFVTYILKILMKEVARLR | | |
| | | | NSNHPDLIKPYNYPM | | |
| NC_025404 | 4772-6647 | gb: NC_025404: | MLNSFYQIICLAVCLTTYTVISIDQHNLLKAGVIVKS | 2 | 48 |
| | | 4772-6647\| | IKGLNFYSRGQANYIIVKLIPNVNVTDTDCDIGSIKR | | |
| | | Organism\| Achimota | YNETVYSLIKPLADNIDYLRTQFAPTKRKKRFAGVAI | | |
| | | virus 2\|Strain Name: | GLTALGVATAAQVTAAVALVKAQENARKLDALADSIQ | | |
| | | UNKNOWN-NC_025404\| | ATNEAVQDLSTGLQAGAIAIQAIQSEINHVINPALER | | |
| | | Protein Name: | LSCEIIDTRVASILNLYLIRLTTVFHRQLVNPALTPL | | |
| | | fusion protein\| | SIQALNHLLQGETEGLVKNESKMTDSKIDLLMSGLIT | | |
| | | Gene Symbol: F | GQVVGVNIKHMQLMIAVFVPTTAQLPNAYVINLLTIT | | |
| | | | ANINNSEVLVQLPNQILERSGIIYQFRGKDCVSSPNH | | |
| | | | MYCPYSDASILSPELQLCLQGRLEMCLFTQVVGSFPT | | |
| | | | RFASDKGIVYANCRHLQCACSEPEGIIYQDDTSAITQ | | |
| | | | IDASKCSTLKLDMLTFKLSTYANKTFDASFSVGKDQM | | |
| | | | LVTNLLDLSAELKTMNASVAHANKLIDKSNLLIQSNA | | |
| | | | LIGHSNTIFIVVIVILAVMVLYLIIVTYIIKVIMVEV | | |
| | | | SRLKRMNIYSIDK | | |
| NC_025410 | 4958-6751 | gb: NC_025410: | MVTIIKPLILLVTVILQISGHIDTTALTSIGAVIASS | 2 | 49 |
| | | 4958-6751\| | KEIMYYAQSTPNYIVIKLIPNLPNIPSQCNFSSIAYY | | |
| | | Organism: Tihoko | NKTLLDLFTPISDNINMLHQRLSNTGRNRRFAGVAIG | | |
| | | virus 1\|Strain Name: | LAALGVATAAQVTAAFALVEAKSNTAKIAQIGQAIQN | | |
| | | UNKNOWN-NC_025410\| | TNAAINSLNAGIGGAVTAIQAIQTQINGIITDQINAA | | |
| | | Protein Name: | TCTALDAQIGTLLNMYLLQLTTTFQPQIQNPALQPLS | | |
| | | fusion protein\| | IQALHRIMQGTSIVLSNLTDSSKYGLNDALSAGLITG | | |
| | | Gene Symbol: F | QIVSVDLRLMQITIAANVPTLSRLENAIAHDIMRITT | | |
| | | | NVNNTEVIVQLPETIMEHAGRLYQFNKDHCLSSTQRF | | |
| | | | FCPYSDAKLLTSKISSCLSGIRGDCIFSPVVGNFATR | | |
| | | | FISVKGVIIANCKFIRCTCLQPEGIISQLDDHTLTVI | | |
| | | | DLKLCNKLDLGLIQFDLQVLSNISYEMTLNTSQNQLI | | |
| | | | LTDPLDLSSELQTMNQSINNAANFIEKSNSLLNSSTY | | |
| | | | EFNRSVALLVALILLSLTILYVIVLTCVVKLLVHEVS | | |
| | | | KNRRHIQDLESHHK | | |
| NC_028249 | 4850-7055 | gb: NC_028249: | MTRVKKLPVPTNPPMHHSLDSPFLNPEHATGKISITD | 2 | 50 |
| | | 4850-7055\| | DTSSQLTNFLYHKYHKTTINHLSRTISGTDPPSAKLN | | |
| | | Organism: Phocine | KFGSPILSTYQIRSALWWIAMVILVHCVMGQIHWTNL | | |
| | | distemper virus\| | STIGIIGTDSSHYKIMTRSSHQYLVLKLMPNVSIIDN | | |
| | | Strain Name: PDV/ | CTKAELDEYEKLLNSVLEPINQALTLMTKNVKSLQSL | | |
| | | Wadden_Sea.NLD/ | GSGRRQRRFAGVVIAGAALGVATAAQITAGVALYQSN | | |
| | | 1988\|Protein Name: | LNAQAIQSLRASLEQSNKAIDEVRQASQNIIIAVQGV | | |
| | | fusion protein\|Gene | QDYVNNEIVPALQHMSCELIGQRLGLKLLRYYTELLS | | |
| | | Symbol: F | VFGPSLRDPVSAEISIQALSYALGGEIHKILEKLGYS | | |
| | | | GNDMVAILETKGIRAKITHVDLSGKFIVLSISYPTLS | | |
| | | | EVKGVVVHRLEAVSYNIGSQEWYTTVPRYVATNGYLI | | |
| | | | SNFDESSCVFVSESAICSQNSLYPMSPILQQCLRGET | | |
| | | | ASCARTLVSGTLGNKFILSKGNIIANCASILCKCHST | | |
| | | | SKIINQSPDKLLTFIASDTCSLVEIDGVTIQVGSRQY | | |
| | | | PDVVYASKVILGPAISLERLDVGTNLGSALKKLNDAK | | |
| | | | VLIESSDQILDTVKNSYLSLGTLIALPVSIGLGLILL | | |
| | | | LLICCCKKRYQHLFSQSTKVAPVFKPDLTGTSKSYVR | | |
| | | | SL | | |
| NC_028362 | 5217-6842 | gb: NC_028362: | MIKKIICIFSMPILLSFCQVDIIKLQRVGILVSKPKS | 2 | 51 |
| | | 5217-6842\| | IKISQNFETRYLVLNLIPNIENAQSCGDQQIKQYKKL | | |
| | | Organism: Caprine | LDRLIIPLYDGLRLQQDIIVVDNNLKNNTNHRAKRFF | | |
| | | parainfluenza virus | GEIIGTIALGVATSAQITAAVALVEAKQARSDIERVK | | |
| | | 3\|Strain Name: | NAVRDTNKAVQSIQGSVGNLIVAVKSVQDYVNNEIVP | | |
| | | JS2013\|Protein Name: | SIKRLGCEAAGLQLGIALTQHYSELTNIFGDNIGTLK | | |
| | | fusion protein\| | EKGIKLQGIASLYHTNITEIFTTSTVDQYDIYDLLFT | | |
| | | Gene Symbol: F | ESIKMRVIDVDLNDYSITLQVRLPLLTKISDAQIYNV | | |
| | | | DSVSYNIGGTEWYIPLPRNIMTKGAFLGGANLQDCIE | | |
| | | | SFSDYICPSDPGFILNRDIENCLSGNITQCPKTLVIS | | |
| | | | DIVPRYAFVDGGVIANCLSTTCTCNGIDNRINQAPDQ | | |
| | | | GIKIITYKDCQTIGINGMLFKTNQEGTLAAYTPVDIT | | |
| | | | LNNSVNLDPIDLSIELNRARSDLAESKEWIKRSEAKL | | |
| | | | DSVGSWYQSSTTEIIQIVMIIVLFIINIIVLIVLIKY | | |
| | | | SRSQNQSMNNHMNEPYILTNKVQ | | |
| AF079780 | 5919-7580 | gb: AF079780\| | MASLLKTICYIYLITYAKLEPTPKSQLDLDSLASIGV | 1 | 52 |
| | | Organism: Tupaia | VDAGKYNYKLMTTGSEKLMVIKLVPNITYATNCNLTA | | |
| | | paramyxovirus\| | HTAYTKMIERLLTPINQSLYEMRSVITERDGGTIFWG | | |
| | | Strain Name: | AIIAGAALGVATAAAITAGVALHRAEQNARNIAALKD | | |
| | | UNKNOWN-AF079780\| | ALRNSNEAIQHLKDAQGHTVLAIQGLQEQINNNIIPK | | |
| | | Protein Name: | LKESHCLGVNNQLGLLLNQYYSEILTVFGPNLQNPVS | | |
| | | fusion protein\| | ASLTIQAIAKAFNGDFNSLMTNLNYDPTDLLDILESN | | |
| | | Gene Symbol: F | SINGRIIDVNLNEKYIALSIEIPNFITLTDAKIQTFN | | |
| | | | RITYGYGSNEWLTLIPDNILEYGNLISNVDLTSCVKT | | |
| | | | KSSYICNQDTSYPISSELTRCLRGDTSSCPRTPVVNS | | |
| | | | RAPTFALSGGHIYANCAKAACRCEKPPMAIVQPATST | | |
| | | | LTFLTEKECQEVVIDQINIQLAPNRLNKTIITDGIDL | | |
| | | | GPEVIINPIDVSAELGNIELEMDKTQKALDRSNKILD | | |
| | | | SMITEVTPDKLLIAMIVVFGILLLWLFGVSYYAFKIW | | |
| | | | SKLHFLDSYVYSLRNPSHHRSNGHQNHSFSTDISG | | |
| EU403085 | 4664-6585 | gb: EU403085: | MQPGSALHLPHLYIIIALVSDGTLGQTAKIDRLIQAG | 1 | 53 |
| | | 4664-6585\| | IVLGSGKELHISQDSGTLDLFVRLLPVLPSNLSHCQL | | |
| | | Organism: Avian | EAITQYNKTVTRLLAPIGKNLEQVLQARPRGRLFGPI | | |
| | | paramyxovirus 14\| | IGSIALGVATSAQITAAIALVRAQQNANDILALKNAL | | |
| | | Strain Name: | QSSNEAIRQLTYGQDKQLLAISKIQKAVNEQILPALD | | |
| | | APMV14/duck/Japan/ | QLDCAVLGTKLAVQLNLYLIEMTTIFGEQINNPVLAT | | |
| | | 11OG0352/2011\| | IPLSYILRLTGAELNNVLMKQARSSLSLVQLVSKGLL | | |
| | | Protein Name: fusion | SGQVIGYDPSVQGLIIRVNLMRTQKIDRALVYQPYVL | | |
| | | protein\|Gene | PITLNSNIVTPIAPECVIQKGTIIEGMSRKDCTELEQ | | |
| | | Symbol: F | DIICRTVTTYTLARDTRLCLQGNISSCRYQQSGTQLH | | |
| | | | TPFITYNGAVIANCDLVSCRCLRPPMIITQVKGYPLT | | |
| | | | IITRSVCQELSVDNLVLNIETHHNFSLNPTIIDPLTR | | |
| | | | VIATTPLEIDSLIQEAQDHANAALAKVEESDKYLRAV | | |
| | | | TGGNYSNWYIVLVIVLLFGNLGWSLLLTVLLCRSRKQ | | |
| | | | QRRYQQDDSVGSERGVGVGTIQYMS | | |
| KX258200 | 4443-6068 | gb: KX258200: | MEKGTVLFLAALTLYNVKALDNTKLLGAGIASGKEHE | 1 | 54 |
| | | 4443-6068\| | LKIYQSSVNGYIAVKLIPFLPSTKRECYNEQLKNYNA | | |
| | | Organism: Avian | TINRLMGPINDNIKLVLSGVKTRTREGKLIGAIIGTA | | |
| | | paramyxovirus 14\| | ALGLATAAQVTAAIALEQAQDNARAILTLKESIRNTN | | |
| | | Strain Name: APMV14/ | NAVSELKTGLSEVSIALSKTQDYINTQIMPALSNLSC | | |
| | | duck/Japan/ | EIVGLKIGIQLSQYLTEVTAVFGNQITNPALQPLSMQ | | |
| | | 11OG0352/2011\| | ALYQLCGGDFSLLLDKIGADRNELESLYEANLVTGRI | | |
| | | Protein Name: fusion | VQYDTADQLVIIQVSIPSVSTLSGYRVTELQSISVDM | | |
| | | protein\|Gene | DHGEGKAVIPRYIVTSGRVIEEMDISPCVLTATAVYC | | |
| | | Symbol: F | NRLLTTSLPESVLKCLDGDHSSCTYTSNSGVLETRYI | | |
| | | | AFDGMLIANCRSIVCKCLDPPYIIPQNKGKPLTIISK | | |
| | | | EVCKKVTLDGITLLIDAEFTGEYGLNITIGPDQFAPS | | |
| | | | GALDISTELGKLNNSINKAEDYIDKSNELLNRVNVDI | | |
| | | | VNDTAVIVLCVMSALVVVWCIGLTVGLIYVSKNTLRA | | |
| | | | VAIKGTSIENPYVSSGKHAKNSS | | |
| KY511044 | 4592-6247 | gb: KY511044: | MIFTMYHVTVLLLLSLLTLPLGIQLARASIDGRQLAA | 1 | 55 |
| | | 4592-6247\| | AGIVVTGEKAINLYTSSQTGTIVVKLLPNVPQGREAC | | |
| | | Organism: Avian | MRDPLTSYNKTLTSLLSPLGEAIRRIHESTTETAGLV | | |
| | | paramyxovirus | QARLVGAIIGSVALGVATSAQITAAAALIQANKNAEN | | |
| | | UPO216\|Strain Name: | ILKLKQSIAATNEAVHEVTDGLSQLAVAVGKMQDFIN | | |
| | | APMV-15/WB/Kr/ | TQFNNTAQEIDCIRISQQLGVELNLYLTELTTVFGPQ | | |
| | | UPO216/2014\|Protein | ITSPALSPLSIQALYNLAGGNLDVLLSKIGVGNNQLS | | |
| | | Name: fusion | ALISSGLISGSPILYDSQTQLLGIQVTLPSVSSLNNM | | |
| | | protein\|Gene | RAIFLETLSVSTDKGFAAALIPKVVTTVGTVTEELDT | | |
| | | Symbol: F | SYCIETDIDLFCTRIVTFPMSPGIYACLNGNTSECMY | | |
| | | | SKTQGALTTPYMSVKGSIVANCKMTTCRCADPASIIS | | |
| | | | QNYGEAVSLIDSSVCRVITLDGVTLRLSGSFDSTYQK | | |
| | | | NITIRDSQVIITGSLDISTELGNVNNSINNALDKIEE | | |
| | | | SNQILESVNVSLTSTNALIVYIICTALALICGITGLI | | |
| | | | LSCYIMYKMRSQQKTLMWLGNNTLDQMRAQTKM | | |
| NC_025360 | 6104-8123 | gb: NC_025360: | MDGPKFRFVLLILLTAPARGQVDYDKLLKVGIFEKGT | 1 | 56 |
| | | 6104-8123\| | ANLKISVSSQQRYMVIKMMPNLGPMNQCGIKEVNLYK | | |
| | | Organism: Atlantic | ESILRLITPISTTLNYIKSEIQVEREVALQPNGTIVR | | |
| | | salmon paramyxo- | FFGLIVAAGALTLATSAQITAGIALHNSLENAKAIKG | | |
| | | virus\|Strain Name: | LTDAIKESNLAIQKIQDATAGTVIALNALQDQVNTNI | | |
| | | ASPV/Yrkje371/95\| | IPAINTLGCTAAGNTLGIALTRYYSELIMIFGPSLGN | | |
| | | Protein Name: fusion | PVEAPLTIQALAGAFNGDLHGMIREYGYTPSDIEDIL | | |
| | | protein\|Gene | RTNSVTGRVIDVDLVGMNIVLEINLPTLYTLRDTKIV | | |
| | | Symbol: F | NLGKITYNVDGSEWQTLVPEWLAIRNTLMGGVDLSRC | | |
| | | | VVSSRDLICKQDPVFSLDTSIISCLNGNTESCPRNRV | | |
| | | | VNSVAPRYAVIRGNILANCISTTCLCGDPGVPIIQKG | | |
| | | | DNTLTAMSINDCKLVGVDGYVFRPGPKAVNVTFNLPH | | |
| | | | LNLGPEVNVNPVDISGALGKVEQDLASSRDHLAKSEK | | |
| | | | ILSGINPNIINTEMVLVAVILSLVCAMVVIGIVCWLS | | |
| | | | ILTKWVRSCRADCRRPNKGPDLGPIMSSQDNLSF | | |

[0301] In some embodiments, a fusogen described herein comprises an amino acid sequence of Table 5, or an amino acid sequence having at least 80%, 85%, 90%, 95%, 96%, 97%, 98%, or 99% sequence identity thereto, or an amino acid sequence having at least 80%, 85%, 90%, 95%, 96%, 97%, 98%, or 99% sequence identity to a portion of the sequence, e.g., a portion of 100, 200, 300, 400, 500, or 600 amino acids in length. For instance, in some embodiments, a fusogen described herein comprises an amino acid sequence having at least 80% identity to any amino acid sequence of Table 5. In some embodiments, a nucleic acid sequence described herein encodes an amino acid sequence of Table 5, or an amino acid sequence having at least 80%, 85%, 90%, 95%, 96%, 97%, 98%, or 99% sequence identity thereto, or an amino acid sequence having at least 80%, 85%, 90%, 95%, 96%, 97%, 98%, or 99% sequence identity to a portion of the sequence, e.g., a portion of 40, 50, 60, 80, 100, 200, 300, 400, 500, or 600 amino acids in length.

[0302] In some embodiments, a fusogen described herein comprises an amino acid sequence set forth in any one of SEQ ID NOS: 57-132, or an amino acid sequence having at least 80%, 85%, 90%, 95%, 96%, 97%, 98%, or 99% sequence identity thereto, or an amino acid sequence having at least 80%, 85%, 90%, 95%, 96%, 97%, 98%, or 99% sequence identity to a portion of the sequence, e.g., a portion of 100, 200, 300, 400, 500, or 600 amino acids in length. For instance, in some embodiments, a fusogen described herein comprises an amino acid sequence having at least 80% identity to an amino acid sequence set forth in any one of SEQ ID NOS: 57-132. In some embodiments, nucleic acid sequence described herein encodes an amino acid sequence set forth in anyone of SEQ ID NOS: 57-132, or an amino acid sequence having at least 80%, 85%, 90%, 95%, 96%, 97%, 98%, or 99% sequence identity thereto, or an amino acid sequence having at least 80%, 85%, 90%, 95%, 96%, 97%, 98%, or 99% sequence identity to a portion of the sequence, e.g., a portion of 40, 50, 60, 80, 100, 200, 300, 400, 500, or 600 amino acids in length.

TABLE 5
Paramyxovirus protein G, H, and HN sequence clusters. Column 1, Genbank ID
includes the Genbank ID of the whole genome sequence of the virus that is
the centroid sequence of the cluster. Column 2, nucleotides of CDS provides
the nucleotides corresponding to the CDS of the gene in the whole genome.
Column 3, Full Gene Name, provides the full name of the gene including Genbank
ID, virus species, strain, and protein name. Column 4, Sequence, provides the
amino acid sequence of the gene. Column 5, #Sequences/Cluster, provides the
number of sequences that cluster with this centroid sequence.

| | Nucleo- | | | | SEQ |
|---|---|---|---|---|---|
| Genbank | tides | | | #Sequences/ | ID |
| ID | of CDS | Ful sequence ID | Sequence | Cluster | NO |
| KU950686 | 4643-5638 | gb: KU950686: | MSKTKDQRTAKTLERTWDTLNHLLFISSCLYKLN | 706 | 57 |
| | | 4643-5638\|Organism: | LKSIAQITLSILAMIISTSLIIAAIIFIASANHK | | |
| | | Human respiratory | VTLTTAIIQDATNQIKNTTPTYLTQNPQLGISFS | | |
| | | syncytial virus\|Strain | NLSGTTLQSTTILASTTPSAESTPQSTTVKIINT | | |
| | | Name: RSVA/Homo | TTTQILPSKPTTKQRQNKPQNKPNNDFHFEVFNF | | |
| | | sapiens/USA/TH_10506/ | VPCSICSNNPTCWAICKRIPNKKPGKKTTTKPTK | | |
| | | 2014/Protein Name: | KPTLKTTKKDPKPQTTKPKEALTTKPTGKPTINT | | |
| | | attachment glyco- | TKTNIRTTLLTSNTKGNPEHTSQEETLHSTTSEG | | |
| | | protein\|Gene Symbol: G | YLSPSQVYTTSGQEETLHSTTSEGYLSPSQVYTT | | |
| | | | SEYLSQSLSSSNTTK | | |
| AB524405 | 6424-8274 | gb: AB524405: | MERGVSQVALENDEREAKNTWRLVFRVTVLFLTI | 418 | 58 |
| | | 6424-8274\|Organism: | VTLAISAAALAFSMNASTPQDLEGIPVAISKVED | | |
| | | Newcastle disease | KITSALGASQDVMDRIYKQVALESPLALLNTEST | | |
| | | virus\|Strain Name: | IMNALTSLSYQINGAANASGCGAPVPDPDYIGGI | | |
| | | Goose/Alaska/415/91\| | GKELIVDDTSDVTSFYPSAFQEHLNFIPAPTTGS | | |
| | | Protein Name: | GCTRIPSFDMSATHYCYTHNVILSGCRDHSHSHQ | | |
| | | hemagglutinin- | YLALGVLRTSATGRVFFSTLRSINLDDTQNRKSC | | |
| | | neuraminidase protein\| | SVSATPLGCDMLCSKVTETEEEDYQSTDPTLMVH | | |
| | | Gene Symbol: HN | GRLGFDGQYHERDLDVHTLFGDWVANYPGVGGGS | | |
| | | | FINNRVWFPVYGGLKPGSPTDKRQEGQYAIYKRY | | |
| | | | NDTCPDDQEYQVRMAKSAYKPNRFGGKRVQQAIL | | |
| | | | SIGVSTTLADDPVLTVTSNTITLMGAEGRVMTVG | | |
| | | | TSHYLYQRGSSYYSPAILYPLTIANKTATLQDPY | | |
| | | | KFNAFTRPGSVPCQASARCPNSCVTGVYTDPYPI | | |
| | | | VFHKNHTLRGVFGTMLDDEQARLNPVSAVFDSIA | | |
| | | | RSRVTRVSSSSTKAAYTTSTCFKVVKTGKVYCLS | | |
| | | | IAEISNTLFGEFRIVPLLVEILRDEGRSEARSAL | | |
| | | | TTQGHPGWNDEVVDPIFCAVTNQTDHRQKLEEYA | | |
| | | | QSWP | | |
| JQ582844 | 4686-5636 | gb: JQ582844: | MSKNKNQRTARTLEKTWDTLNHLIVISSCLYKLN | 278 | 59 |
| | | 4686-5636\|Organism: | LKSIAQIALSVLAMIISTSLIIAAIIFIISANHK | | |
| | | Human respiratory | VTLTTVTVQTIKNHTEKNITTYLTQVSPERVSPS | | |
| | | syncytial virus\|Strain | KQPTTTPPIHTNSATISPNTKSETHHTTAQTKGR | | |
| | | Name: NH1067\|Protein | TTTPTQNNKPSTKPRPKNPPKKPKDDYHFEVFNF | | |
| | | Name: receptor-binding | VPCSICGNNQLCKSICKTIPNNKPKKKPTTKPTN | | |
| | | glycoprotein\|Gene | KPPTKTTNKRDPKTPAKTLKKETTINPTTKKPTP | | |
| | | Symbol: G | KTTERDTSTPQSTVLDTTTSKHTERDTSTPQSTV | | |
| | | | LDTTTSKHTIQQQSLHSITPENTPNSTQTPTASE | | |
| | | | PSTSNSTQKL | | |
| AB256456 | 7271-9136 | gb: AB254456: | MSPHRDRINAFYRDNPHPKGSRIVINREHLMIDR | 128 | 60 |
| | | 7271-9136\|Organism: | PYVLLAVLFVMFLSLIGLLAIAGIRLHRAAIYTA | | |
| | | Measles virus\|Strain | EIHKSLSTNLDVTNSIEHQVKDVLTPLFKIIGDE | | |
| | | Name: SSPE-Kobe-1\| | VGLRTPQRFTDLVKFISDKIKFLNPDREYDFRDL | | |
| | | Protein Name: | TWCINPPERIKLDYDQYCADVAAEELMNALVNST | | |
| | | Hemagglutinin\|Gene | LLEARATNQFLAVSKGNCSGPTTIRGQFSNMSLS | | |
| | | Symbol: H | LLDLYLSRGYNVSSIVTMTSQGMYGGTYLVGKPN | | |
| | | | LSSKGSELSQLSMHRVFEVGVIRNPGLGAPVFHM | | |
| | | | TNYFEQPVSNDFSNCMVALGELRFAALCHREDSV | | |
| | | | TVPYQGSGKGVSFQLVKLGVWKSPTDMQSWVPLS | | |
| | | | TDDPVIDRLYLSSHRGVIADNQAKWAVPTTRTDD | | |
| | | | KLRMETCFQQACKGKNQALCENPEWAPLKDNRIP | | |
| | | | SYGVLSVNLSLTVELKIKIASGFGPLITHGSGMD | | |
| | | | LYKTNHDNVYWLTIPPMKNLALGVINTLEWIPRF | | |
| | | | KVSPNLFTVPIKEAGEDCHAPTYLPAEVDGDVKL | | |
| | | | SSNLVILPGQDLQYVLATYDTSRVEHAVVYYVYS | | |
| | | | PSRSFSYFYPFRLPIKGVPIELQVECFTWDQKLW | | |
| | | | CRHFCVLADSESGGHITHSGMVGMGVSCTVTRED | | |
| | | | GTNRRQGCQ | | |
| AB040874 | 6614-8362 | gb: AB040774: | MEPSKLFTMSDNATFAPGPVINAADKKTFRTCFR | 87 | 61 |
| | | 6614-8362\|Organism: | ILVLSVQAVTLILVIVTLGELVRMINDQGLSNQL | | |
| | | Mumps virus\|Strain | SSIADKIRESATMIASAVGVMNQVIHGVTVSLPL | | |
| | | Name: Miyaharal\| | QIEGNQNQLLSTLATICTGKKQVSNCSTNIPLVN | | |
| | | Protein Name: | DLRFINGINKFIIEDYATHDFSIGHPLNMPSFIP | | |
| | | hemagglutinin- | TATSPNGCTRIPSFSLGKTHWCYTHNVINANCKD | | |
| | | neuraminidase\|Gene | HTSSNQYISMGILVQTASGYPMFKTLKIQYLSDG | | |
| | | Symbol: HN | LNRKSCSIATVPDGCAMYCYVSTQLETDDYAGSS | | |
| | | | PPTQKLTLLFYNDTVTERTISPTGLEGNWATLVP | | |
| | | | GVGSGIYFENKLIFPAYGGVLPNSSLGVKSAREF | | |
| | | | FRPVNPYNPCSGPQQDLDQRALRSYFPSYFSNRR | | |
| | | | VQSAFLVCAWNQILVTNCELVVPSNNQTLMGAEG | | |
| | | | RVLLINNRLLYYQRSTSWWPYELLYEISFTFTNS | | |
| | | | GQSSVNMSWIPIYSFTRPGSGNCSGENVCPTACV | | |
| | | | SGVYLDPWPLTPYSHQSGINRNFYFTGALLNSST | | |
| | | | TRVNPTLYVSALNNLKVLAPYGNQGLFASYTTTT | | |
| | | | CFQDTGDASVYCVYIMELASNIVGEFQILPVLTR | | |
| | | | LTIT | | |
| AB736166 | 6709-8427 | gb: AB736166: | MEYWKHTNHGKDAGNELETATATHGNRLTNKITY | 78 | 62 |
| | | 6709-8427\|Organism: | ILWTITLVLLSIVFIIVLINSIKSEKAHESLLQD | | |
| | | Human respirovirus 3\| | INNEFMEVTEKIQVASDNTNDLIQSGVNTRLLTI | | |
| | | Strain Name: ZMLS/ | QSHVQNYIPISLTQQISDLRKFISEITIRNDNQE | | |
| | | 2011\|Protein Name: | VPPQRITHDVGIKPLNPDDFWRCTSGLPSLMRTP | | |
| | | hemagglutinin- | KIRLMPGPGLLAMPTTVDGCVRTPSLVINDLIYA | | |
| | | neuraminidase\|Gene | YTSNLITRGCQDIGKSYQVLQIGIITVNSDLVPD | | |
| | | Symbol: HN | LNPRISHTFNINDNRKSCSLALLNTDVYQLCSTP | | |
| | | | KVDERSDYASSGIEDIVLDIVNYDGSISTTRFKN | | |
| | | | NNISFDQPYAALYPSVGPGIYYKGKIIFLGYGGL | | |
| | | | EHPINENAICNTTGCPGKTQRDCNQASHSPWFSD | | |
| | | | RRMVNSIIVVDKGLNSVPKLKVWTISMRQNYWGS | | |
| | | | EGRLLLLGNKIYIYTRSTSWHSKLQLGIIDITDY | | |
| | | | SDIRIKWTWHNVLSRPGNNECPWGHSCPDGCITG | | |
| | | | VYTDAYPLNPTGSIVSSVILDSQKSRVNPVITYS | | |
| | | | TATERVNELAIRNKTLSAGYTTTSCITHYNKGYC | | |
| | | | FHIVEINHKSLNTFQPMLFKTEIPKSCS | | |
| KJ627396 | 6166-6885 | gb: KJ627396: | MEVKVENIRAIDMLKARVKNRVARSKCFKNASLI | 71 | 63 |
| | | 6166-6885\|Organism: | LIGITTLSIALNIYLIINYTIQKTTSESEHHTSS | | |
| | | Human metapneumovirus\| | PPTESNKETSTIPIDNPDITPNSQHPTQQSTESL | | |
| | | Strain Name: HMPV/ | TLYPASSMSPSETEPASTPGITNRLSLADRSTTQ | | |
| | | Homo sapiens/PER/ | PSESRTKTNSTVHKKNKKNISSTISRTQSPPRTT | | |
| | | FLI1305/2010/A\| | AKAVSRTTALRMSSTGERPTTTSVQSDSSTTAQN | | |
| | | Protein Name: | HEETGPANPQASVSTM | | |
| | | attachment glyco- | | | |
| | | protein G\|Gene | | | |
| | | Symbol: G | | | |
| AB475097 | 7079-8902 | gb: AB475097: | MLSYQDKVGAFYKDNARANSSKLSLVTEEQGGRR | 45 | 64 |
| | | 7079-8902\|Organism: | PPYLLFVLLILLVGILALLAIAGVRFRQVSTSNV | | |
| | | Canine distemper | EFGRLLKDDLEKSEAVHHQVMDVLTPLFKIIGDE | | |
| | | virus\|Strain Name: | IGLRLPQKLNEIKQFILQKTNFFNPNREFDFRDL | | |
| | | M25CR\|Protein Name: | HWCINPPSKIKVNFTNYCDAIGVRKSIASAANPI | | |
| | | hemagglutinin\|Gene | LLSALSGGRGDIFPPYRCSGATTSVGRVFPLSVS | | |
| | | Symbol: H | LSMSLISKTSEIISMLTAISDGVYGKTYLLVPDY | | |
| | | | IEREFDTQKIRVFEIGFIKRWLNDMPLLQTTNYM | | |
| | | | VLPENSKAKVCTIAVGELTLASLCVDESTVLLYH | | |
| | | | DSNGSQDSILVVTLGIFGATPMNQVEEVIPVAHP | | |
| | | | SVERIHITNHRGFIKDSVATWMVPALVSEQQEGQ | | |
| | | | KNCLESACQRKSYPMCNQTSWEPFGGVQLPSYGR | | |
| | | | LTLPLDASIDLQLNISFTYGPVILNGDGMDYYEN | | |
| | | | PLLDSGWLTIPPKNGTILGLINKASRGDQFTVTP | | |
| | | | HVLTFAPRESSGNCYLPIQTSQIMDKDVLTESNL | | |
| | | | VVLPTQNFRYVVATYDISRENHAIVYYVYDPIRT | | |
| | | | ISYTYPFRLTTKGRPDFLRIECFVWDDDLWCHQF | | |
| | | | YRFESDITNSTTSVEDLVRIRFSCNRSKP | | |
| AJ849636 | 7326-9155 | gb: AJ849636: | MSAQRERINAFYKDNPHNKNHRVILDRERLVIER | 34 | 65 |
| | | 7326-9155\|Organism: | PYILLGVLLVMFLSLIGLLAIAGIRLHRATVGTS | | |
| | | Pestes-des-petits- | EIQSRLNTNIELTESIDHQTKDVLTPLFKIIGDE | | |
| | | ruminants virus\|Strain | VGIRIPQKFSDLVKFISDKIKFLNPDREYDFRDL | | |
| | | Name: Turkey 2000\| | RWCMNPPERVKINFDQFCEYKAAVKSIEHIFESP | | |
| | | Protein Name: | LNKSKKLQSLTLGPGTGCLGRTVTRAHFSELTLT | | |
| | | hemagglutinin\|Gene | LMDLDLEMKHNVSSVFTVVEEGLFGRTYTVWRSD | | |
| | | Symbol: H | ARDPSTDLGIGHFLRVFEIGLVRDLGLGPPVFHM | | |
| | | | TNYLTVNMSDDYRRCLLAVGELKLTALCSSSETV | | |
| | | | TLGERGVPKREPLVVVILNLAGPTLGGELYSVLP | | |
| | | | TSDLMVEKLYLSSHRGIIKDDEANWVVPSTDVRD | | |
| | | | LQNKGECLVEACKTRPPSFCNGTGSGPWSEGRIP | | |
| | | | AYGVIRVSLDLASDPGVVITSVFGPLIPHLSGMD | | |
| | | | LYNNPFSRAVWLAVPPYEQSFLGMINTIGFPNRA | | |
| | | | EVMPHILTTEIRGPRGRCHVPIELSRRVDDDIKI | | |
| | | | GSNMVILPTIDLRYITATYDVSRSEHAIVYYIYD | | |
| | | | TGRSSSYFYPVRLNFKGNPLSLRIECFPWRHKVW | | |
| | | | CYHDCLIYNTITDEEVHTRGLTGIEVTCNPV | | |
| AB005795 | 6693-8420 | gb: AB005795: | MDGDRSKRDSYWSTSPGGSTTKLVSDSERSGKVD | 23 | 66 |
| | | 6693-8420\|Organism: | TWLLILAFTQWALSIATVIICIVIAARQGYSMER | | |
| | | Sendai virus\|Strain | YSMTVEALNTSNKEVKESLTSLIRQEVITRAANI | | |
| | | Name: Ohita\|Protein | QSSVQTGIPVLLNKNSRDVIRLIEKSCNRQELTQ | | |
| | | Name: hemagglutinin- | LCDSTIAVHHAEGIAPLEPHSFWRCPAGEPYLSS | | |
| | | neuraminidase | DPEVSLLPGPSLLSGSTTISGCVRLPSLSIGEAI | | |
| | | protein\| Gene Symbol: | YAYSSNLITQGCADIGKSYQVLQLGYISLNSDMF | | |
| | | HN | PDLNPVVSHTYDINDNRKSCSVVATGTRGYQLCS | | |
| | | | MPIVDERTDYSSDGIEDLVLDILDLKGRTKSHRY | | |
| | | | SNSEIDLDHPFSALYPSVGSGIATEGSLIFLGYG | | |
| | | | GLTTPLQGDTKCRIQGCQQVSQDTCNEALKITWL | | |
| | | | GGKQVVSVLIQVNDYLSERPRIRVTTIPITQNYL | | |
| | | | GAEGRLLKLGDQVYIYTRSSGWHSQLQIGVLDVS | | |
| | | | HPLTISWTPHEALSRPGNEDCNWYNTCPKECISG | | |
| | | | VYTDAYPLSPDAANVATVTLYANTSRVNPTIMYS | | |
| | | | NTTNIINMLRIKDVQLEAAYTTTSCITHFGKGYC | | |
| | | | FHIIEINQKSLNTLQPMLFKTSIPKLCKAES | | |
| AF457102 | 6903-8630 | gb: AF457102\| | MAEKGKTNSSYWSTTRNDNSTVNTHINTPAGRTH | 21 | 67 |
| | | Organism: Human | IWLLIATTMHTVLSFIIMILCIDLIIKQDTCMKT | | |
| | | parainfluenza virus 1 | NIMTVSSMNESAKIIKETITELIRQEVISRTINI | | |
| | | strain Washington/ | QSSVQSGIPILLNKQSRDLTQLIEKSCNRQELAQ | | |
| | | 1964\|Strain Name: | ICENTIAIHHADGISPLDPHDFWRCPVGEPLLSN | | |
| | | Washington 1964\| | NPNISLLPGPSLLSGSTTISGCVRLPSLSIGDAI | | |
| | | Protein Name: HN | YAYSSNLITQGCADIGKSYQVLQLGYISLNSDMY | | |
| | | glycoprotein\|Gene | PDLNPVISHTYDINDNRKSCSVIAAGTRGYQLCS | | |
| | | Symbol: HN | LPTVNETTDYSSEGIEDLVFDILDLKGKTKSHRY | | |
| | | | KNEDITFDHPFSAMYPSVGSGIKIENTLIFLGYG | | |
| | | | GLTTPLQGDTKCVINRCTNVNQSVCNDALKITWL | | |
| | | | KKRQVVNVLIRINNYLSDRPKIVVETIPITQNYL | | |
| | | | GAEGRLLKLGKKIYIYTRSSGWHSNLQIGSLDIN | | |
| | | | NPMTIKWAPHEVLSRPGNQDCNWYNRCPRECISG | | |
| | | | VYTDAYPLSPDAVNVATTTLYANTSRVNPTIMYS | | |
| | | | NTSEIINMLRLKNVQLEAAYTTTSCITHFGKGYC | | |
| | | | FHIVEINQASLNTLQPMLFKTSIPKICKITS | | |
| KJ627397 | 6146-6888 | gb: KJ627397: | MEVRVENIRAIDMFKAKMKNRIRSSKCYRNATLI | 21 | 68 |
| | | 6146-6888\|Organism: | LIGLTALSMALNIFLIIDYATLKNMTKVEHCVNM | | |
| | | Human metapneumovirus\| | PPVEPSKKSPMTSAADLNTKLNPQQATQLTTEDS | | |
| | | Strain Name: HPMPV/ | TSLAATSENHLHTETTPTSDATISQQATDEHTTL | | |
| | | Homo sapeins/PER/ | LRPINRQTTQTTTEKKPTGATTKKDKEKETTTRT | | |
| | | FPP00098/2010/B\| | TSTAATQTLNTTNQTSNGREATTTSARSRNGATT | | |
| | | Protein Name: | QNSDQTIQAADPSSKPYHTQTNTTTAHNTDTSSL | | |
| | | attachment | SS | | |
| | | attachment glyco- | | | |
| | | prtein G\|Gene | | | |
| | | Symbol: G | | | |
| AF017149 | 8913-10727 | gb: AF017149\| | MMADSKLVSLNNNLSGKIKDQGKVIKNYYGTMDI | 14 | 69 |
| | | Organism: Hendra | KKINDGLLDSKILGAFNTVIALLGSIIIIVMNIM | | |
| | | virus\|Strain Name: | IIQNYTRTTDNQALIKESLQSVQQQIKALTDKIG | | |
| | | UNKNOWN-AF017149\| | TEIGPKVSLIDTSSTITIPANIGLLGSKISQSTS | | |
| | | Protein Name: | SINENVNDKCKFTLPPLKIHECNISCPNPLPFRE | | |
| | | glycoprotein\|Gene | YRPISQGVSDLVGLPNQICLQKTTSTILKPRLIS | | |
| | | Symbol: G | YTLPINTREGVCITDPLLAVDNGFFAYSHLEKIG | | |
| | | | SCTRGIAKQRIIGVGEVLDRGDKVPSMFMTNVWT | | |
| | | | PPNPSTIHHCSSTYHEDFYYTLCAVSHVGDPILN | | |
| | | | STSWTESLSLIRLAVRPKSDSGDYNQKYIAITKV | | |
| | | | ERGKYDKVMPYGPSGIKQGDTLYFPAVGFLPRTE | | |
| | | | FQYNDSNCPIIHCKYSKAENCRLSMGVNSKSHYI | | |
| | | | LRSGLLKYNLSLGGDIILQFIEIADNRLTIGSPS | | |
| | | | KIYNSLGQPVFYQASYSWDTMIKLGDVDTVDPLR | | |
| | | | VQWRNNSVISRPGQSQCPRFNVCPEVCWEGTYND | | |
| | | | AFLIDRLNWVSAGVYLNSNQTAENPVFAVFKDNE | | |
| | | | ILYQVPLAEDDTNAQKTITDCFLLENVIWCISLV | | |
| | | | EIYDTGDSVIRPKLFAVKIPAQCSES | | |
| AF212302 | 8943-10751 | gb: AF213302\| | MPAENKKVRFENTTSDKGKIPSKVIKSYYGTMDI | 14 | 70 |
| | | Oganism: Nipah virus\| | KKINEGLLDSKILSAFNTVIALLGSIVIIVMNIM | | |
| | | Strain Name: | IIQNYTRSTDNQAVIKDALQGIQQQIKGLADKIG | | |
| | | UNKNOWN-AF212302\| | TEIGPKVSLIDTSSTITIPANIGLLGSKISQSTA | | |
| | | Protein Name: | SINENVNEKCKFTLPPLKIHECNISCPNPLPFRE | | |
| | | attachment glyco- | YRPQTEGVSNLVGLPNNICLQKTSNQILKPKLIS | | |
| | | protein\|Gene Symbol: | YTLPVVGQSGTCITDPLLAMDEGYFAYSHLERIG | | |
| | | G | SCSRGVSKQRIIGVGEVLDRGDEVPSLFMTNVWT | | |
| | | | PPNPNTVYHCSAVYNNEFYYVLCAVSTVGDPILN | | |
| | | | STYWSGSLMMTRLAVKPKSNGGGYNQHQLALRSI | | |
| | | | EKGRYDKVMPYGPSGIKQGDTLYFPAVGFLVRTE | | |
| | | | FKYNDSNCPITKCQYSKPENCRLSMGIRPNSHYI | | |
| | | | LRSGLLKYNLSDGENPKVVFIEISDQRLSIGSPS | | |
| | | | KIYDSLGQPVFYQASFSWDTMIKFGDVLTVNPLV | | |
| | | | VNWRNNTVISRPGQSQCPRFNTCPEICWEGVYND | | |
| | | | AFLIDRINWISAGVFLDSNQTAENPVFTVFKDNE | | |
| | | | ILYRAQLASEDTNAQKTITNCFLLKNKIWCISLV | | |
| | | | EIYDTGDNVIRPKLFAVKIPEQCT | | |
| EU439428 | 6751-8638 | gb: EU439428: | MEYWKHTNSTKDTNNELGTTRDRHSSKATNIIMY | 14 | 71 |
| | | 6751-8638\|Organism: | IFWTTTSTILSVIFIMILINLIQENNHNKLMLQE | | |
| | | Swine parainfluenza | IKKEFAVIDTKIQKTSDDISTSIQSGINTRLLTI | | |
| | | virus 3\|Strain Name: | QSHVQNYIPLSLTQQMSDLRKFINDLTTKREHQE | | |
| | | 92-7783_ISU-92\| | VPIQRMTHDSGIEPLNPDKFWRCTSGNPSLTSSP | | |
| | | Protein Name: | KIRLIPGPGLLATSTTVNGCIRIPSLAINNLIYA | | |
| | | hemagglutinin- | YTSNLITQGCQDIGKSYQVLQIGIITINSDLVPD | | |
| | | neuraminidase HN\| | LNPRVTHTFNIDDNRKSCSLALLNTDVYQLCSTP | | |
| | | Gene Symbol: HN | KVDERSDYASTGIEDIVLDIVTSNGLIITTRFTN | | |
| | | | NNITFDKPYAALYPSVGPGIYYKDKVIFLGYGGL | | |
| | | | EHEENGDVICNTTGCPGKTQRDCNQASYSPWFSN | | |
| | | | RRMVNSIIVVDKSIDTTFSLRVWTIPMRQNYWGS | | |
| | | | EGRLLLLGDRIYIYTRSTSWHSKLQLGVIDISDY | | |
| | | | NNIRINWTWHNVLSRPGNDECPWGHSCPDGCITG | | |
| | | | VYTDAYPLNPSGSVVSSVILDSQKSRENPIITYS | | |
| | | | TATNRVNELAIYNRTLPAAYTTTNCITHYDKGYC | | |
| | | | FHIVEINHRSLNTFQPMLFKTEVPKNCS | | |
| KF530164 | 6157-6906 | gb: KF530164: | MEVRVENIRAIDMFKAKIKNRIRSSRCYRNATLI | 14 | 72 |
| | | 6157-6906\|Organism: | LIGLTALSMALNIFLIIDHATLRNMIKTENCANM | | |
| | | Human metapneumovirus\| | PSAEPSKKTPMTSTAGPSTKPNPQQATQWTTENS | | |
| | | Strain Name: HPMV/ | TSPAATLEGHPYTGTTQTPDTTAPQQTTDKHTAL | | |
| | | AUS/172832788/2004/B\| | PKSTNEQITQTTTEKKTTRATTQKREKRKENTNQ | | |
| | | Protein Name: | TTSTAATQTTNTTNQTRNASETITTSDGPRIDTT | | |
| | | attachment glyco- | TQSSEQTARATEPGSSPYHARRGAGPR | | |
| | | protein G\|Gene | | | |
| | | Symbol: G | | | |
| AB910309 | 6960-8747 | gb: AB910309: | MKNINIKYYKDSNRYLGKILDEHKIVNSQLYSLS | 12 | 73 |
| | | 6960-8747\|Organism: | IKVITIIAIIVSLIATIMTIINATSGRTTLNSNT | | |
| | | Feline morbillivirus\| | DILLNQRDEIHSIHEMIFDRVYPLITAMSTELGL | | |
| | | Strain Name: SS1\| | HIPTLLDELTKAIDQKIKIMNPPVDTVTSDLSWC | | |
| | | Protein Name: | IKPPNGIIIDPKGYCESMELSKTYKLLLDQLDVS | | |
| | | hemagglutinin protein\| | RKKSLTINRKNINQCQLVDDSEIIFATVNIQSTP | | |
| | | Gene Symbol: H | RFLNFGHTVSNQRITFGQGTYSSTYILTIQEDGI | | |
| | | | TDVQYRVFEIGYISDQFGVFPSLIVSRVLPIRMV | | |
| | | | LGMESCTLTSDRQGGYFLCMNTLTRSIYDYVNIR | | |
| | | | DLKSLYITLPHYGKVNYTYFNFGKIRSPHEIDKL | | |
| | | | WLTSDRGQIISGYFAAFVTITIRNYNNYPYKCLN | | |
| | | | NPCFDNSENYCRGWYKNITGTDDVPILAYLLVEM | | |
| | | | YDEEGPLITLVAIPPYNYTAPSHNSLYYDDKINK | | |
| | | | LIMTTSHIGYIQINEVHEVIVGDNLKAILLNRLS | | |
| | | | DEHPNLTACRLNQGIKEQYKSDGMIISNSALIDI | | |
| | | | QERMYITVKAIPPVGNYNFTVELHSRSNTSYILL | | |
| | | | PKQFNAKYDKLHLECFNWDKSWWCALIPQFSLSW | | |
| | | | NESLSVDTAIFNLINCK | | |
| AB759118 | 7116-8957 | gb: AB759118: | MASPSELNRSQATLYEGDPNSKRTWRTVYRASTL | 11 | 74 |
| | | 7116-8957\|Organism: | ILDLAILCVSIVAIVRMSTLTPSDVTDSISSSIT | | |
| | | Avian paramyxovirus 6\| | SLSDTYQSVWSDTHQKVNSIFKEVGISIPVTLDK | | |
| | | Strain Name: red- | MQVEMGTAVNIITDAVRQLQGVNGSAGFSITNSP | | |
| | | necked stint/Japan/ | EYSGGIDALIYPQKSLNGKSLAISDLLEHPSFIP | | |
| | | 8KS0813/2008\|Protein | APTTSHGCTRIPTFHLGYRHWCYSHNTIESGCHD | | |
| | | Name: hemaglutinin- | AGESIMYLSMGAVGVGHQGKPVFTTSAAVILDDG | | |
| | | neuraminidase\|Gene | KNRKSCSVVANPNGCDVLCSLVKQTEDQDYADPT | | |
| | | Symbol: HN | PTPMIHGRLHFNGTYTESMLDQSLFTGHWVAQYP | | |
| | | | AVGSGSVSHGRLFFPLYGGISKSSSLFPKLRAHA | | |
| | | | YFTHNEELECKNLTSKQREDLFNAYMPGKIAGSL | | |
| | | | WAQGIVICNLTTLADCKIAVANTSTMMMAAEGRL | | |
| | | | QLVQDKVVLYQRSSSWWPVLIYYDILVSELVNAR | | |
| | | | HLDIVNWVPYPQSKFPRPTWTKGLCEKPSICPAV | | |
| | | | CVTGVYQDVWVVSVGDFSNETVVIGGYLEAASER | | |
| | | | KDPWIAAANQYNWLTRRQLFTAQTEAAYSSTTCF | | |
| | | | RNTHQDKVFCLTIMEVTDNLLGDWRIAPLLYEVT | | |
| | | | VVDRQQSSRKAVAMSEAHRTRFKYYSPENKFTPQ | | |
| | | | H | | |
| AY141760 | 6791-8485 | gb: AY141760\| | MDPKSYYCNEDLRSDGGEKSPGGDLYKGIILVST | 8 | 75 |
| | | Organism: Fer-de- | VISLIIAIISLAFIIDNKINIQSLDPLRGLEDSY | | |
| | | Lance paramyxovirus\| | LVPIKDKSESISQDIQEGIFPRLNLITAATTTTI | | |
| | | Strain Name: ATCC | PRSIAIQTKDLSDLIMNRCYPSVVNNDTSCDVLA | | |
| | | VR-895\|Protein Name: | GAIHSNLFSQLDPSTYWTCSSGTPTMNQTVKLLP | | |
| | | hemagglutinin- | DNSQIPGSTYSTGCVRIPTFSLGSMIYSYSHNVI | | |
| | | neuraminidase protein | YEGCNDHSKSSQYWQLGYISTSKTGEPLQQVSRT | | |
| | | HN\|Gene Symbol: HN | LTLNNGLNRKSCSTVAQGRGAYLLCTNVVEDERT | | |
| | | | DYSTEGIQDLTLDYIDIFGAERSYRYTNNEVDLD | | |
| | | | RPYAALYPSVGSGTVYNDRILFLGYGGLMTPYGD | | |
| | | | QAMCQAPECTSATQEGCNSNQLIGYFSGRQIVNC | | |
| | | | IIEIITVGTEKPIIRVRTIPNSQVWLGAEGRIQT | | |
| | | | LGGVLYLYIRSSGWHALAQTGIILTLDPIRISWI | | |
| | | | VNTGYSRPGNGPCSASSRCPAQCITGVYTDIFPL | | |
| | | | SQNYGYLATVTLLSGVDRVNPVISYGTSTGRVAD | | |
| | | | SQLTSSSQVAAYTTTTCFTFNQKGYCYHIIELSP | | |
| | | | ATLGIFQPVLVVTEIPKICS | | |
| EU877976 | 6248-8161 | gb: EU877976: | MQGNMEGSRDNLTVDDELKTTWRLAYRVVSLLLM | 8 | 76 |
| | | 6248-8161\|Organism: | VSALIISIVILTRDNSQSIITAINQSSDADSKWQ | | |
| | | Avian paramyxovirus | TGIEGKITSIMTDTLDTRNAALLHIPLQLNTLEA | | |
| | | 4\|Strain Name: APMV-4/ | NLLSALGGNTGIGPGDLEHCRYPVHDTAYLHGVN | | |
| | | KR/YJ/06\|Protein Name: | RLLINQTADYTAEGPLDHVNFIPAPVTTTGCTRI | | |
| | | hemagglutinin- | PSFSVSSSIWCYTHNVIETGCNDHSGSNQYISMG | | |
| | | neuraminidase protein | VIKRAGNGLPYFSTVVSKYLTDGLNRKSCSVAAG | | |
| | | HN\|Gene Symbol: HN | SGHCYLLCSLVSEPEPDDYVSPDPTPMRLGVLTW | | |
| | | | DGSYTEQAVPERIFKNIWSANYPGVGSGAIVGNK | | |
| | | | VLFPFYGGVRNGSTPEVMNRGRYYYIQDPNDYCP | | |
| | | | DPLQDQILRAEQSYYPTRFGRRMVMQGVLACPVS | | |
| | | | NNSTIASQCQSYYFNNSLGFIGAESRIYYLNGNI | | |
| | | | YLYQRSSSWWPHPQIYLLDSRIASPGTQNIDSGV | | |
| | | | NLKMLNVTVITRPSSGFCNSQSRCPNDCLFGVYS | | |
| | | | DIWPLSLTSDSIFAFTMYLQGKTTRIDPAWALFS | | |
| | | | NHAIGHEARLFNKEVSAAYSTTTCFSDTIQNQVY | | |
| | | | CLSILEVRSELLGAFKIVPFLYRVL | | |
| AB176531 | 6821-8536 | gb: AB176531: | MEDYSNLSLKSIPKRTCRIIFRTATILGICTLIV | 7 | 77 |
| | | 6821-8536\|Organism: | LCSSILHEIIHLDVSSGLMDSDDSQQGIIQPIIE | | |
| | | Human parainfluenza | SLKSLIALANQILYNVAIIIPLKIDSIETVIFSA | | |
| | | virus 2\|Strain Name: | LKDMHTGSMSNTNCTPGNLLLHDAAYINGINKFL | | |
| | | Nishio\|Protein Name: | VLKSYNGTPKYGPLLNIPSFIPSATSPNGCTRIP | | |
| | | hemagglutinin- | SFSLIKTHWCYTHNVMLGDCLDFTTSNQYLAMGI | | |
| | | neuraminidase protein | IQQSAAAFPIFRTMKTIYLSDGINRKSCSVTAIP | | |
| | | HN\|Gene Symbol: HN | GGCVLYCYVATRSEKEDYATTDLAELRLAFYYYN | | |
| | | | DTFIERVISLPNTTGQWATINPAVGSGIYHLGFI | | |
| | | | LFPVYGGLISGTPSYNKQSSRYFIPKHPNITCAG | | |
| | | | NSSEQAAAARSSYVIRYHSNRLIQSAVLICPLSD | | |
| | | | MHTARCNLVMFNNSQVMMGAEGRLYVIDNNLYYY | | |
| | | | QRSSSWWSASLFYRINTDFSKGIPPIIEAQWVPS | | |
| | | | YQVPRPGVMPCNATSFCPANCITGVYADVWPLND | | |
| | | | PEPTSQNALNPNYRFAGAFLRNESNRTNPTFYTA | | |
| | | | SASALLNTTGFNNTNHKAAYTSSTCFKNTGTQKI | | |
| | | | YCLIIIEMGSSLLGEFQIIPFLRELIP | | |
| AF052755 | 6584-8281 | gb: AF052755\| | MVAEDAPVRATCRVLFRTTTLIFLCTLLALSISI | 7 | 78 |
| | | Organism: | LYESLITQKQIMSQAGSTGSNSGLGSITDLLNNI | | |
| | | Parainfluenza virus 5\| | LSVANQIIYNSAVALPLQLDTLESTLLTAIKSLQ | | |
| | | Strain Name: W3A\| | TSDKLEQNCSWSAALINDNRYINGINQFYFSIAE | | |
| | | Protein Name: | GRNLTLGPLLNMPSFIPTATTPEGCTRIPSFSLT | | |
| | | hemagglutinin- | KTHWCYTHNVILNGCQDHVSSNQFVSMGIIEPTS | | |
| | | neuraminidase protein | AGFPFFRTLKTLYLSDGVNRKSCSISTVPGGCMM | | |
| | | HN\|Gene Symbol: HN | YCFVSTQPERDDYFSAAPPEQRIIIMYYNDTIVE | | |
| | | | RIINPPGVLDVWATLNPGTGSGVYYLGWVLFPIY | | |
| | | | GGVIKGTSLWNNQANKYFIPQMVAALCSQNQATQ | | |
| | | | VQNAKSSYYSSWFGNRMIQSGILACPLRQDLTNE | | |
| | | | CLVLPFSNDQVLMGAEGRLYMYGDSVYYYQRSNS | | |
| | | | WWPMTMLYKVTITFTNGQPSAISAQNVPTQQVPR | | |
| | | | PGTGDCSATNRCPGFCLTGVYADAWLLTNPSSTS | | |
| | | | TFGSEATFTGSYLNTATQRINPTMYIANNTQIIS | | |
| | | | SQQFGSSGQEAAYGHTTCFRDTGSVMVYCIYIIE | | |
| | | | LSSSLLGQFQIVPFIRQVTLS | | |
| BK005918 | 6560-8290 | gb: BK005918\| | MSQLGTDQIMHLAQPAIARRTWRLCFRIFALFIL | 7 | 79 |
| | | Organism: Porcine | IAIVITQIFMLTFDHTLLTTTQFLTSIGNLQSTI | | |
| | | rubulavirus\|Strain | TSWTPDVQAMLSISNQLIYTTSITLPLKISTTEM | | |
| | | Name: UNKNOWN- | SILTAIRDHCHCPDCSSACPTRQMLLNDPRYMSG | | |
| | | BK005918\|Protein Name: | VNQFIGAPTESINITFGPLFGIPSFIPTSTTTQG | | |
| | | attachemnt protein\| | CTRIPSFALGPSHWCYTHNFITAGCADGGHSNQY | | |
| | | Gene Symbol: HN | LAMGTIQSASDGSPLLITARSYYLSDGVNRKSCS | | |
| | | | IAVVPGGCAMYCYVATRSETDYYAGNSPPQQLLT | | |
| | | | LVFSNDTIIERTIHPTGLANGWVMLVPGVGSGTL | | |
| | | | YNEYLLFPAYGGMQQILANQSGEINQFFTPYNAT | | |
| | | | VRCAMAQPQFSQRAAASYYPRYFSNRWIRSAIVA | | |
| | | | CPYRAIYQTQCTLIPLPNRMVMMGSEGRIFTLGD | | |
| | | | RLFYYQRSSSWWPYPLLYQVGLNFLTTPPSVSSM | | |
| | | | TQVPLEHLARPGKGGCPGNSHCPATCVTGVYADV | | |
| | | | WPLTDPRSGVGGTSLVAAGGLDSTSERMAPVNYL | | |
| | | | AIGESLLSKTYLLSKTQPAAYTTTTCFRDTDTGK | | |
| | | | IYCITIAELGKVLLGEFQIVPFLREIKIQSRY | | |
| EU338-414 | 6015-7913 | gb: EU338414: | MDFPSRENLAAGDISGRKTWRLLFRILTLSIGVV | 7 | 80 |
| | | 6015-7913\|Organism: | CLAINIATIAKLDHLDNMASNTWTTTEADRVISS | | |
| | | Avian prarmyxoviurs 2\| | ITTPLKVPVNQINDMFRIVALDLPLQMTSLQKEI | | |
| | | Strain Name: APMV-2/ | TSQVGFLAESINNVLSKNGSAGLVLVNDPEYAGG | | |
| | | Chicken/California/ | IAVSLYQGDASAGLNFQPISLIEHPSFVPGPTTA | | |
| | | Yucaipa/56\|Protein | KGCIRIPTFHMGPSHWCYSHNIIASGCQDASHSS | | |
| | | Name: hemagglutinin- | MYISLGVLKASQTGSPIFLTTASHLVDDNINRKS | | |
| | | neuraminidase protein | CSIVASKYGCDILCSIVIETENEDYRSDPATSMI | | |
| | | HN\|Gene Symbol: HN | IGRLFFNGSYTESKINTGSIFSLFSANYPAVGSG | | |
| | | | IVVGDEAAFPIYGGVKQNTWLFNQLKDFGYFTHN | | |
| | | | DVYKCNRTDIQQTILDAYRPPKISGRLWVQGILL | | |
| | | | CPVSLRPDPGCRLKVFNTSNVMMGAEARLIQVGS | | |
| | | | TVYLYQRSSSWWVVGLTYKLDVSEITSQTGNTLN | | |
| | | | HVDPIAHTKFPRPSFRRDACARPNICPAVCVSGV | | |
| | | | YQDIWPISTATNNSNIVWVGQYLEAFYSRKDPRI | | |
| | | | GIATQYEWKVTNQLFNSNTEGGYSTTTCFRNTKR | | |
| | | | DKAYCVVISEYADGVFGSYRIVPQLIEIRTTTGK | | |
| | | | SE | | |
| KC403973 | 6234-6964 | gb: KC403973: | MEVKVENIRTIDMLKARVKNRVARSKCFKNASLI | 6 | 81 |
| | | 6234-6964\|Organism: | LIGITTLSIALNIYLIINYTMQENTSESEHHTSS | | |
| | | Human metapneumovirus\| | SPMESSRETPTVPIDNSDTNPSSQYPTQQSTEGS | | |
| | | Strain Name: HMPV/USA/ | TLYFAASASSPETEPTSTPDTTSRPPFVDTHTTP | | |
| | | TN-82-518/1982/A\| | PSASRTKTSPAVHTKNNPRISSRTHSPPWAMTRT | | |
| | | Protein Name: | VRRTTTLRTSSIRKRSSTASVQPDSSATTHKHEE | | |
| | | attachment glyco- | ASPVSPQTSASTTRPQRKSMEASTSTTYNQTS | | |
| | | protein G\|Gene | | | |
| | | Symbol: G\|Segment: 8 | | | |
| KF015281 | 4511-5844 | gb: KF015281: | MRPAEQLIQENYKLTSLSMGRNFEVSGSTTNLNF | 6 | 82 |
| | | 4511-5844\|Organism: | ERTQYPDTFRAVVKVNQMCKLIAGVLTSAAVAVC | | |
| | | Canine pneumovirus\| | VGVIMYSVFTSNHKANSMQNATIRNSTSAPPQPT | | |
| | | Strain Name: dog/ | AGPPTTEQGTTPKFTKPPTKTTTHHEITEPAKMV | | |
| | | Bari/100-12/ITA/2012\| | TPSEDPYQCSSNGYLDRPDLPEDFKLVLDVICKP | | |
| | | Protein Name: | PGPEHHSTNCYEKREINLGSVCPDLVTMKANMGL | | |
| | | attachment protein\| | NNGGGEEAAPYIEVITLSTYSNKRAMCVHNGCDQ | | |
| | | Gene Symbol: G | GFCFFLSGLSTDQKRAVLELGGQQAIMELHYDSY | | |
| | | | WKHYWSNSNCVVPRTNCNLTDQTVILFPSFNNKN | | |
| | | | QSQCTTCADSAGLDNKFYLTCDGLSRNLPLVGLP | | |
| | | | SLSPQAHKAALKQSTGTTTAPTPETRNPTPAPRR | | |
| | | | SKPLSRKKRALCGVDSSREPKPTMPYWCPMLQLF | | |
| | | | PRRSNS | | |
| KF973339 | 4624-5310 | gb: KF973339: | MSKTKDQRAAKTLEKTWDTLNHLLFISSCLYKSN | 6 | 83 |
| | | 4624-5310\|Organism: | LKSIAQITLSILAMTIPTSLIIVATTFIASANNK | | |
| | | Respiratory syncytial | VTPTTAIIQDATSQIKNTTPTHLTQNPQPGISFF | | |
| | | virus type A\|Strain | NLSGTISQTTAILAPTTPSVEPILQSTTVKTKNT | | |
| | | Name: RSV-A/US/BID- | TTTQIQPSKLTTKQRQNKPPNKPNDDFHFEVFNF | | |
| | | V7358/2002\|Protein | VPCSICSNNPTCWAICKRIPSKKPGKKTTTKPTK | | |
| | | Name: truncated | KQTIKTTKKDLKPQTTKPKEAPTT | | |
| | | attachment glyco- | | | |
| | | protein\|Gene Symbol: G | | | |
| FJ215864 | 6383-8116 | gb: FJ215864: | MSNIASSLENIVEQDSRKTTWRAIFRWSVLLITT | 5 | 84 |
| | | 6383-8116\|Organism: | GCLALSIVSIVQIGNLKIPSVGDLADEVVTPLKT | | |
| | | Avian paramyxovirus 8\| | TLSDTLRNPINQINDIFRIVALDIPLQVTSIQKD | | |
| | | Strain Name: pintail/ | LASQFSMLIDSLNAIKLGNGTNLIIPTSDKEYAG | | |
| | | Wakuya/20/78\|Protein | GIGNPVFTVDAGGSIGFKQFSLIEHPSFIAGPTT | | |
| | | Name: hemagglutinin- | TRGCTRIPTFHMSESHWCYSHNIIAAGCQDASAS | | |
| | | neuraminidase | SMYISMGVLHVSSSGTPIFLTTASELIDDGVNRK | | |
| | | protein\|Gene Symbol: | SCSIVATQFGCDILCSIVIEKEGDDYWSDTPTPM | | |
| | | HN | RHGRFSFNGSFVETELPVSSMFSSFSANYPAVGS | | |
| | | | GEIVKDRILFPIYGGIKQTSPEFTELVKYGLFVS | | |
| | | | TPTTVCQSSWTYDQVKAAYRPDYISGRFWAQVIL | | |
| | | | SCALDAVDLSSCIVKIMNSSTVMMAAEGRIIKIG | | |
| | | | IDYFYYQRSSSWWPLAFVTKLDPQELADTNSIWL | | |
| | | | TNSIPIPQSKFPRPSYSENYCTKPAVCPATCVTG | | |
| | | | VYSDIWPLTSSSSLPSIIWIGQYLDAPVGRTYPR | | |
| | | | FGIANQSHWYLQEDILPTSTASAYSTTTCFKNTA | | |
| | | | RNRVFCVTIAEFADGLFGEYRITPQLYELVRNN | | |
| JX857409 | 6619-8542 | gb: JX857409: | MEETKVKTSEYWARSPQIHATNHPNVQNREKIKE | 5 | 85 |
| | | 6619-8542\|Organism: | ILTILISFISSLSLVLVIAVLIMQSLHNGTILRC | | |
| | | Porcine parainfluenza | KDVGLESINKSTYSISNAILDVIKQELITRIINT | | |
| | | virus 1\|Strain Name: | QSSVQVALPILINKKIQDLSLIIEKSSKVHQNSP | | |
| | | S206NJ\|Protein Name: | TCSGVAALTHVEGIKPLDPDDYWRCPSGEPYLED | | |
| | | hemagglutinin protein\| | ELTLSLIPGPSMLAGTSTIDGCVRLPSLAIGKSL | | |
| | | Gene Symbol: H | YAYSSNLITKGCQDIGKSYQVLQLGIITLNSDLH | | |
| | | | PDLNPIISHTYDINDNRKSCSVAVSETKGYQLCS | | |
| | | | MPRVNEKTDYTSDGIEDIVFDVLDLKGSSRSFKF | | |
| | | | SNNDINFDHPFSALYPSVGSGIIWKNELYFLGYG | | |
| | | | ALTTALQGNTKCNLMGCPGATQDNCNKFISSSWL | | |
| | | | YSKQMVNVLIQVKGYLSSKPSIIVRTIPITENYV | | |
| | | | GAEGKLVGTRERIYIYTRSTGWHTNLQIGVLNIN | | |
| | | | HPITITWTDHRVLSRPGRSPCAWNNKCPRNCTTG | | |
| | | | VYTDAYPISPDANYVATVTLLSNSTRNNPTIMYS | | |
| | | | SSDRVYNMLRLRNTELEAAYTTTSCIVHFDRGYC | | |
| | | | FHIIEINQKELNTLQPMLFKTAIPKACRISNL | | |
| KF908238 | 7510-9249 | gb: KF908228: | MQDSRGNTQIFSQANSMVKRTWRLLFRIVTLILL | 5 | 86 |
| | | 7510-9249\|Organism: | ISIFVLSLIIVLQSTPGNLQSDVDIIRKELDELM | | |
| | | Human parainfluenza | ENFETTSKSLLSVANQITYDVSVLTPIRQEATET | | |
| | | virus 4b\|Strain Name: | NIIAKIKDHCKDRVVKGESTCTLGHKPLHDVSFL | | |
| | | QLD-01\|Protein Name: | NGFNKFYFTYRDNVQIRLNPLLDYPNFIPTATTP | | |
| | | hemagglutinin- | HGCIRIPSFSLSQTHWCYTHNTILRGCEDTASSK | | |
| | | neuraminidase | QYVSLGTLQTLENGDPYFKVEYSHYLNDRKNRKS | | |
| | | protein\|Gene Symbol: | CSVVAVLDGCLLYCVIMTKNETENFKDPQLATQL | | |
| | | HN | LTYISYNGTIKERIINPPGSSRDWVHISPGVGSG | | |
| | | | ILYSNYIIFPLYGGLMENSMIYNNQSGKYFFPNS | | |
| | | | TKLPCSNKTSEKITGAKDSYTITYFSKRLIQSAF | | |
| | | | LICDLRQFLSEDCEILIPSNDHMLVGAEGRLYNI | | |
| | | | ENNIFYYQRGSSWWPYPSLYRIKLNSNKKYPRII | | |
| | | | EIKFTKIEIAPRPGNKDCPGNKACPKECITGVYQ | | |
| | | | DIWPLSYPNTAFPHKKRAYYTGFYLNNSLARRNP | | |
| | | | TFYTADNLDYHQQERLGKFNLTAGYSTTTCFKQT | | |
| | | | TTARLYCLYILEVGDSVIGDFQIFPFLRSIDQAI | | |
| | | | T | | |
| KT071757 | 6066-7962 | gb: KT071757: | MDALSRENLTEISQGGRRTWRMLFRILTLVLTLV | 5 | 87 |
| | | 6066-7962\|Organism: | CLAINIATIAKLDSIDTSKVQTWTTTESDRVIGS | | |
| | | Avian paramyxovirus 2\| | LTDTLKIPINQVNDMFRIVALDLPLQMTTLQKEI | | |
| | | Strain Name: APMV-2/ | ASQVGFLAESINNFLSKNGSAGSVLVNDPEYAGG | | |
| | | Emberiza spodocephala/ | IGTSLFHGDSASGLDFEAPSLIEHPSFIPGPTTA | | |
| | | China/Daxing'anling/ | KGCIRIPTFHMSASHWCYSHNIIASGCQDAGHSS | | |
| | | 974/2013\|Protein Name: | MYISMGVLKATQAGSPSFLTTASQLVDDKLNRKS | | |
| | | hemagglutinin- | CSIISTTYGCDILCSLVVENEDADYRSDPPTDMI | | |
| | | neuraminidase | LGRLFFNGTYSESKLNTSAIFQLFSANYPAVGSG | | |
| | | protein\|Gene Symbol: | IVLGDEIAFPVYGGVKQNTWLFNQLKDYGYFAHN | | |
| | | HN | NVYKCNNSNIHQTVLNAYRPPKISGRLWSQVVLI | | |
| | | | CPMRLFINTDCRIKVFNTSTVMMGAEARLIQVGS | | |
| | | | DIYLYQRSSSWWVVGLTYKLDFQELSSKTGNILN | | |
| | | | NVSPIAHAKFPRPSYSRDACARPNICPAVCVSGV | | |
| | | | YQDIWPISTAHNLSQVVWVGQYLEAFYARKDPWI | | |
| | | | GIATQYDWKKNVRLFNANTEGGYSTTTCFRNTKR | | |
| | | | DKAFCVIISEYADGVFGSYRIVPQLIEIRTTSKK | | |
| | | | GLPS | | |
| LC041132 | 6605-8437 | gb: LC041132: | MQPGISEVSFVNDERSERGTWRLLFRILTIVLCL | 4 | 88 |
| | | 6605-8437\|Organism: | TSIGIGIPALIYSKEAATSGDIDKSLEAVKTGMS | | |
| | | Avain paramyxovirus | TLSSKIDESINTEQKIYRQVILEAPVSQLNMESN | | |
| | | goose/Shimane/67/ | ILSAITSLSYQIDGTSNSSGCGSPMHDQDFVGGI | | |
| | | 2000\|Strain Name: | NKEIWTTDNVNLGEITLTPFLEHLNFIPAPTTGN | | |
| | | goose/Shimane/67/2000\| | GCTRIPSFDLGLTHWCYTHNVILSGCQDYSSSFQ | | |
| | | Protein Name: | YIALGVLKISATGHVFLSTMRSINLDDERNRKSC | | |
| | | hemagglutinin- | SISATSIGCDIICSLVTEREVDDYNSPAATPMIH | | |
| | | neuraminidase | GRLDFSGKYNEVDLNVGQLFGDWSANYPGVGGGS | | |
| | | protein\|Gene Symbol: | FLNGRVWFPIYGGVKEGTPTFKENDGRYAIYTRY | | |
| | | HN | NDTCPDSESEQVSRAKSSYRPSYFGGKLVQQAVL | | |
| | | | SIKIDDTLGLDPVLTISNNSITLMGAESRVLQIE | | |
| | | | EKLYFYQRGTSWFPSLIMYPLTVDDKMVRFEPPT | | |
| | | | IFDQFTRPGNHPCSADSRCPNACVTGVYTDGYPI | | |
| | | | VFHNNHSIAAVYGMQLNDVTNRLNPRSAVWYGVS | | |
| | | | MSNVIRVSSSTTKAAYTTSTCFKVKKTQRVYCLS | | |
| | | | IGEIGNTLFGEFRIVPLLLEVYSEKGKSLKSSFD | | |
| | | | GWEDISINNPLRPLDNHRVDPILISNYTSSWP | | |
| AF092942 | 4705-5478 | gb: AF092942\| | MSNHTHHLKFKTLKRAWKASKYFIVGLSCLYKFN | 3 | 89 |
| | | Organism: Bovine | LKSLVQTALTTLAMITLTSLVITAIIYISVGNAK | | |
| | | respiratory syncytial | AKPTSKPTIQQTQQPQNHTSPFFTEHNYKSTHTS | | |
| | | virus\|Strain Name: | IQSTTLSQLPNTDTTRETTYSHSINETQNRKIKS | | |
| | | ATue51908\|Protein | QSTLPATRKPPINPSGSNPPENHQDHNNSQTLPY | | |
| | | Name: attachment | VPCSTCEGNLACLSLCQIGPERAPSRAPTITLKK | | |
| | | glycoprotein\|Gene | TPKPKTTKKPTKTTIHHRTSPEAKLQPKNNTAAP | | |
| | | Symbol: G | QQGILSSPEHHTNQSTTQI | | |
| AF326114 | 6691-847 | gb: AF326114\| | MWNSIPQLVSDHEEAKGKFTDIPLQDDTDSQHPS | 3 | 90 |
| | | Organism: Menangle | GSKSTCRTLFRTVSIILSLVILVLGVTSTMFSAK | | |
| | | virus\|Strain Name: | YSGGCATNSQLLGVSNLINQIQKSIDSLISEVNQ | | |
| | | UNKNOWN-AF326114\| | VSITTAVTLPIKIMDFGKSVTDQVTQMIRQCNTV | | |
| | | Protein Name: | CKGPGQKPGSQNVRIMPSNNLSTFQNINMSARGI | | |
| | | attachment protein\| | AYQDVPLTFVRPIKNPQSCSRFPSYSVSFGVHCF | | |
| | | Gene Symbol: HN | ANAVTDQTCELNQNTFYRVVLSVSKGNISDPSSL | | |
| | | | ETKAETRTPKGTPVRTCSIISSVYGCYLLCSKAT | | |
| | | | VPESEEMKTIGFSQMFILYLSMDSKRIIYDNIVS | | |
| | | | STSAIWSGLYPGEGAGIWHMGQLFFPLWGGIPFL | | |
| | | | TPLGQKILNSTLDIPEVGSKCKSDLTSNPAKTKD | | |
| | | | MLFSPYYGENVMVFGFLTCYLLSNVPTNCHADYL | | |
| | | | NSTVLGFGSKAQFYDYRGIVYMYIQSAGWYPFTQ | | |
| | | | IFRITLQLKQNRLQAKSIKRIEVTSTTRPGNREC | | |
| | | | SVLRNCPYICATGLFQVPWIVNSDAITSKEVDNM | | |
| | | | VFVQAWAADFTEFRKGILSLCSQVSCPINDLLSK | | |
| | | | DNSYMRDTTTYCFPQTVPNILSCTSFVEWGGDSG | | |
| | | | NPINILEIHYEVIFVAS | | |
| GU206351 | 7500-9714 | gb: GU206351: | MDKSYYTEPEDQRGNSRTWRLLFRLIVLTLLCLI | 3 | 91 |
| | | 7500-9714\|Organism: | ACTSVSQLFYPWLPQVLSTLISLNSSIITSSNGL | | |
| | | Avian paramyxovirus | KKEILNQNIKEDLIYREVAINIPLTLDRVTVEVG | | |
| | | 5\|Strain Name: | TAVNQITDALRQLQSVNGSAAFALSNSPDYSGGI | | |
| | | gudgerigar/Kunitachi/ | EHLVFQRNTLINRSVSVSDLIEHPSFIPTPTTQH | | |
| | | 74\|Protein Name: | GCTRIPTFHLGTRHWCYSHNIIGQGCADSGASMM | | |
| | | heamgglutinin | YISMGALGVSSLGTPTFTTSATSILSDSLNRKSC | | |
| | | neuraminidase protein\| | SIVATTEGCDVLCSIVTQTEDQDYADHTPTPMIH | | |
| | | Gene Symbol: HN | GRLWFNGTYTERSLSQSLFLGTWAAQYPAVGSGI | | |
| | | | MTPGRVIFPFYGGVIPNSPLFLDLERFALFTHNG | | |
| | | | DLECRNLTQYQKEAIYSAYKPPKIRGSLWAQGFI | | |
| | | | VCSVGDMGNCSLKVINTSTVMMGAEGRLQLVGDS | | |
| | | | VMYYQRSSSWWPVGILYRLSLVDIIARDIQVVIN | | |
| | | | SEPLPLSKFPRPTWTPGVCQKPNVCPAVCVTGVY | | |
| | | | QDLWAISAGETLSEMTFFGGYLEASTQRKDPWIG | | |
| | | | VANQYSWFMRRRLFKTSTEAAYSSSTCFRNTRLD | | |
| | | | RNFCLLIFELTDNLLGDWRIVPLLFELTIV | | |
| JQ001776 | 8170-10275 | gb: JQ001776: | MLSQLQKNYLDNSNQQGDKMNNPDKKLSVNFNPL | 3 | 92 |
| | | 8170-10275\|Organism: | ELDKGQKDLNKSYYVKNKNYNVSNLLNESLHDIK | | |
| | | Cedar virus\|Strain | FCIYCIFSLLIIITIINIITISIVITRLKVHEEN | | |
| | | Name: CG1a\|Protein | NGMESPNLQSIQDSLSSLTNMINTEITPRIGILV | | |
| | | Name: attachment | TATSVTLSSSINYVGTKTNQLVNELKDYITKSCG | | |
| | | glycoprotein\|Gene | FKVPELKLHECNISCADPKISKSAMYSTNAYAEL | | |
| | | Symbol: G | AGPPKIFCKSVSKDPDFRLKQIDYVIPVQQDRSI | | |
| | | | CMNNPLLDISDGFFTYIHYEGINSCKKSDSFKVL | | |
| | | | LSHGEIVDRGDYRPSLYLLSSHYHPYSMQVINCV | | |
| | | | PVTCNQSSFVFCHISNNTKTLDNSDYSSDEYYIT | | |
| | | | YFNGIDRPKTKKIPINNMTADNRYIHFTFSGGGG | | |
| | | | VCLGEEFIIPVTTVINTDVFTHDYCESFNCSVQT | | |
| | | | GKSLKEICSESLRSPTNSSRYNLNGIMIISQNNM | | |
| | | | TDFKIQLNGITYNKLSFGSPGRLSKTLGQVLYYQ | | |
| | | | SSMSWDTYLKAGFVEKWKPFTPNWMNNTVISRPN | | |
| | | | QGNCPRYHKCPEICYGGTYNDIAPLDLGKDMYVS | | |
| | | | VILDSDQLAENPEITVFNSTTILYKERVSKDELN | | |
| | | | TRSTTTSCFLFLDEPWCISVLETNRFNGKSIRPE | | |
| | | | IYSYKIPKYC | | |
| KP271123 | 6644-8431 | gb: KP271123: | MWSTQASKHPAMVNSATNLVDIPLDHPSSAQFPI | 3 | 93 |
| | | 6644-8431\|Organism: | NRKRTGRLIYRLFSILCNLILISILISLVVIWSR | | |
| | | Teviot virus/Strain | SSRDCAKSDGLSSVDNQLSSLSRSINSLITEVNQ | | |
| | | Name: Geelong\|Protein | ISVTTAINLPIKLSEFGKSVVDQVTQMIRQCNAA | | |
| | | Name: attachment | CKGPGEKPGIQNVRINIPNNFSTYSELNRTANSL | | |
| | | protein\|Gene Symbol: | NFQSRTALFARPNPYPKTCSRFPSYSVYFGIHCF | | |
| | | HN | SHAVTDSSCELSDSTYYRLVIGVADKNLSDPADV | | |
| | | | KYIGETTTPVRVQTRGCSVVSSIYGCYLLCSKSN | | |
| | | | QDYQDDFREQGFHQMFILFLSRELKTTFFDDMVS | | |
| | | | STTVTWNGLYPGEGSGIWHMGHLVFPLWGGIRFG | | |
| | | | THASEGILNSTLELPPVGPSCKRSLADNGLINKD | | |
| | | | VLFSPYFGDSVMVFAYLSCYMLSNVPTHCQVETM | | |
| | | | NSSVLGFGSRAQFYDLKGIVYLYIQSAGWFSYTQ | | |
| | | | LFRLSLQSKGYKLSVKQIKRIPISSTSRPGTEPC | | |
| | | | DIIHNCPYTCATGLFQAPWIVNGDSIRDRDVRNM | | |
| | | | AFVQAWSGAINTFQRPFMSICSQYSCPLSELLDS | | |
| | | | ESSIMRSTTTYCFPSLTESILQCVSFIEWGGPVG | | |
| | | | NPISINEVYSSISFRPD | | |
| AY286409 | 7644-9542 | gb: AY286409\| | MVDPPAVSYYTGTGRNDRVKVVTTQSTNPYWAHN | 2 | 94 |
| | | Organism: Mossman | PNQGLRRLIDMVVNVIMVTGVIFALINIILGIVI | | |
| | | virus\|Strain Name: | ISQSAGSRQDTSKSLDIIQHVDSSVAITKQIVME | | |
| | | UNKNOWN-AY286409\| | NLEPKIRSILDSVSFQIPKLLSSLLGPGKTDPPI | | |
| | | Protein Name: | ALPTKASTPVIPTEYPSLNTTTCLRIEESVTQNA | | |
| | | attachment glyco- | AALFNISFDLKTVMYELVTRTGGCVTLPSYSELY | | |
| | | protein\|Gene Symbol: G | TRVRTFSTAIRNPKTCQRAGQETDLNLIPAFIGT | | |
| | | | DTGILINSCVRQPVIATGDGIYALTYLTMRGTCQ | | |
| | | | DHRHAVRHFEIGLVRRDAWWDPVLTPIHHFTEPG | | |
| | | | TPVFDGCSLTVQNQTALALCTLTTDGPETDIHNG | | |
| | | | ASLGLALVHFNIRGEFSKHKVDPRNIDTQNQGLH | | |
| | | | LVTTAGKSAVKKGILYSFGYMVTRSPEPGDSKCV | | |
| | | | TEECNQNNQEKCNAYSKTTLDPDKPRSMIIFQID | | |
| | | | VGAEYFTVDKVVVVPRTQYYQLTSGDLFYTGEEN | | |
| | | | DLLYQLHNKGWYNKPIRGRVTFDGQVTLHEHSRT | | |
| | | | YDSLSNQRACNPRLGCPSTCELTSMASYFPLDKD | | |
| | | | FKAAVGVIALRNGMTPIITYSTDDWRNHWKYIKN | | |
| | | | ADLEFSESSLSCYSPNPPLDDYVLCTAVITAKVM | | |
| | | | SNTNPQLLATSWYQYDKCHT | | |
| AY900001 | 7809-9938 | gb: AY900001\| | MNPVAMSNFYGINQADHLREKGDQPEKGPSVLTY | 2 | 95 |
| | | Organism: J-virus\| | VSLITGLLSLFTIIALNVTNIIYLTGSGGTMATI | | |
| | | Strain Name: UNKNOWN- | KDNQQSMSGSMRDISGMLVEDLKPKTDLINSMVS | | |
| | | AY900001\|Protein Name: | YTIPSQISAMSAMIKNEVLRQCTPSFMFNNTICP | | |
| | | attachment glyco- | IAEHPVHTSYFEEVGIEAISMCTGTNRKLVVNQG | | |
| | | protein\|Gene Symbol: G | INFVEYPSFIPGSTKPGGCVRLPSFSLGLEVFAY | | |
| | | | AHAITQDDCTSSSTPDYYFSVGRIADHGTDVPVF | | |
| | | | ETLAEWFLDDKMNRRSCSVTAAGKGGWLGCSILV | | |
| | | | GSFTDELTSPEVNRISLSYMDTFGKKKDWLYTGS | | |
| | | | EVRADQSWSALFFSVGSGVVIGDTVYFLVWGGLN | | |
| | | | HPINVDAMCRAPGCQSPTQSLCNYAIKPQEWGGN | | |
| | | | QIVNGILHFKHDTNEKPTLHVRTLSPDNNWMGAE | | |
| | | | GRLFHFHNSGKTFIYTRSSTWHTLPQVGILTLGW | | |
| | | | PLSVQWVDITSISRPGQSPCEYDNRCPHQCVTGV | | |
| | | | YTDLFPLGVSYEYSVTAYLDQVQSRMNPKIALVG | | |
| | | | AQEKIYEKTITTNTQHADYTTTSCFAYKLRVWCV | | |
| | | | SIVEMSPGVITTRQPVPFLYHLNLGCQDTSTGSL | | |
| | | | TPLDAHGGTYLNTDPVGNKVDCYFVLHEGQIYFG | | |
| | | | MSVGPINYTYSIVGRSREIGANMNVSLNQLCHSV | | |
| | | | YTEFLKEKEHPGTRNNIDVEGWLLKRIETLNGTK | | |
| | | | IFGLDDLEGSGPGHQSGPEDPSIAPIGHN | | |
| EF199772 | 6150-6944 | gb: EF199772: | MEVKVENVGKSQELKVKVKNFIKRSDCKKKLFAL | 2 | 96 |
| | | 6150-6944\|Organism: | ILGLVSFELTMNIMLSVMYVESNEALSLCRIQGT | | |
| | | Avian metapneumovirus\| | PAPRDNKTNTENATKETTLHTTTTTRDPEVRETK | | |
| | | Strain Name: PL-2\| | TTKPQANEGATNPSRNLTTKGDKHQTTRATTEAE | | |
| | | Protein Name: | LEKQSKQTTEPGTSTQKHTPARPSSKSPTTTQAT | | |
| | | attachment glyco- | AQPTTPTAPKASTAPKNRQATTKKTETDTTTASR | | |
| | | protein\|Gene Symbol: G | ARNTNNPTETATTTPKATTETGKGKEGPTQHTTK | | |
| | | | EQPETTARETTTPQPRRTAGASPRAS | | |
| JF424833 | 5981-7156 | gb: JF424833: | MGSKLYMVQGTSAYQTAVGFWLDIGRRYILAIVL | 2 | 97 |
| | | 5981-7156\|Organism: | SAFGLTCTVTIALTVSVIVEQSVLEECRNYNGGD | | |
| | | Avian metapneumovirus\| | RDWWSTTQEQPTTAPSATPAGNYGGLQTARTRKS | | |
| | | Strain Name: IT/Ty/A/ | ESCLHVQISYGDMYSRSDTVLGGFDCMGLLVLCK | | |
| | | 259-01/03\|Protein | SGPICQRDNQVDPTALCHCRVDLSSVDCCKVNKI | | |
| | | Name: attachment | STNSSTTSEPQKTNPAWPSQDNTDSDPNPQGITT | | |
| | | protein\|Gene Symbol: G | STATLLSTSLGLMLTSKTGTHKSGPPQALPGSNT | | |
| | | | NGKTTTDRELGSTNQPNSTTNGQHNKHTQRMTLP | | |
| | | | PSYDNTRTILQHTTPWEKTFSTYKPTHSPTNESD | | |
| | | | QSLPTTQNSINCEHFDPQGKEKICYRVGSYNSNI | | |
| | | | TKQCRIDVPLCSTYNTVCMKTYYTEPFNCWRRIW | | |
| | | | RCLCDDGVGLVEWCCTS | | |
| JN689227 | 7918-12444 | gb: JN689227: | MSQLAAHNLAMSNFYGIHQGGQSTSQKEEEQPVQ | 2 | 98 |
| | | 7918-12444\|Organism: | GVIRYASMIVGLLSLFTIIALNVTNIIYMTESGG | | |
| | | Tailam virus\|Strain | TMQSIKNAQGSIDGSMKDLSGTIMEDIKPKTDLI | | |
| | | Name: TL8K\|Protein | NSMVSYNIPAQLSMIHQIIKNDVLKQCTPSFMFN | | |
| | | Name: attachment | NTICPLAENPTHSRYFEEVNLDSISECSGNEMSL | | |
| | | glycoprotein\|Gene | ELGTEPEFIEYPSFAPGSTKPGSCVRLPSFSLSS | | |
| | | Symbol: G | TVFAYTHTIMGHGCSELDVGDHYLAIGRIADAGH | | |
| | | | EIPQFETISSWFINDKINRRSCTVAAGVMETWMG | | |
| | | | CVIMTETFYDDLDSLDTGKITISYLDVFGRKKEW | | |
| | | | IYTRSEILYDYTYTSVYFSIGSGVVVGDTVYFLL | | |
| | | | WGSLSSPIEETAYCYAPGCSNYNQRMCNEAQRPA | | |
| | | | KFGHRQMANAILRFKTNSMGKPSISVRTLSPTVI | | |
| | | | PFGTEGRLIYSDFTKIIYLYLRSTSWYVLPLTGL | | |
| | | | LILGPPVSISWVTQEAVSRPGEYPCGASNRCPKD | | |
| | | | CITGVYTDLFPLGARYEYAVTVYLNAETYRVNPT | | |
| | | | LALIDRSKIIARKKITTESQKAGYTTTTCFVFKL | | |
| | | | RIWCMSVVELAPATMTAFEPVPFLYQLDLTCKRN | | |
| | | | NGTTAMQFSGQDGMYKSGRYKSPRNECFFEKVSN | | |
| | | | KYYFVVSTPEGIQPYEVRDLTPERVSHVIMYISD | | |
| | | | VCAPALSAFKKLIPAMRPITTLTIGNWQFRPVDI | | |
| | | | SGGLRVNIYRNLTRYGDLSMSAPEDPGTDTFPGT | | |
| | | | HAPSKGHEEVGHYTLPNEKLSEVTTAAVKTKESL | | |
| | | | NLIPDTKDTRGEEENGSGLNEIITGHTTPGHIKT | | |
| | | | HPAETKVTKHTVIIPQIEEDGSGATTSTELQDET | | |
| | | | GYHTEDYNTTNTNGSLTAPNERNNYTSGDHTVSG | | |
| | | | EDITHTITVSDRTKTTQTLPTDNTFNQTPTKIQE | | |
| | | | GSPKSESTPKDYTAIESEDSHFTDPTLIRSTPEG | | |
| | | | TIVQVIGDQFHSAVTQLGESNAIGNSEPIDQGNN | | |
| | | | LIPTTDRGTMDNTSSQSHSSTTSTQGSHSAGHGS | | |
| | | | QSNMNLTALADTDSVTDQSTSTQEIDHEHENVSS | | |
| | | | ILNPLSRHTRVMRDTVQEALTGAWGFIRGMIP | | |
| KC562242 | 6178-6926 | gb: KC562242: | MEVRVENIRAIDMFKAKIKNRIRNSRCYRNATLI | 2 | 99 |
| | | 6178-6926\|Organism: | LIGLTALSMALNIFLIIDHATLRNMIKTENCANM | | |
| | | Human metapneumovirus\| | PSAEPSKKTPMTSIAGPSTKPNPQQATQWTTENS | | |
| | | Strain Name: HMPV/USA/ | TSPAATLEGHPYTGTTQTPDTTAPQQTTDKHTAL | | |
| | | C1-334/2004/B\|Protein | PKSTNEQITQTTTEKKTTRATTQKRKKEKKTQTK | | |
| | | Name: attachment | PQVQLQPKQPTPPTKSEMQVRQSQHPTDPELTPL | | |
| | | glycoprotein G\|Gene | PKAVNRQPGQQNQAPHHIMHGEVQDPGERNTQVS | | |
| | | Symbol: G | HPSS | | |
| KC915036 | 6154-7911 | gb: KC915036: | MEVKIENVGKSQELRVKVKNFIKRSDCKKKLFAL | 2 | 100 |
| | | 6154-7911\|Organism: | ILGLISFDITMNIMLSVMYVESNEALSSCRVQGT | | |
| | | Avian metapneumovirus | PAPRDNRTNTENTAKETTLHTMTTTRNTEAGGTK | | |
| | | type C\|Strain Name: | TTKPQADERATSPSKNPTIGADKHKTTRATTEAE | | |
| | | GDY\|Protein Name: | QEKQSKQTTEPGTSTPKHIPARPSSKSPATTKTT | | |
| | | attachment glyco- | TQPTTPTVAKGGTAPKNRQTTTKKTEADTPTTSR | | |
| | | protein\|Gene Symbol: G | AKQTNKPTGTETTPPRATTETDKDKEGPTQHTTK | | |
| | | | EQPETTAGGTTTPQPRRTTSRPAPTTNTKEGAET | | |
| | | | TGTRTTKSTQTSASPPRPTRSTPSKTATGTNKRA | | |
| | | | TTTKGPNTASTDRRQQTRTTPKQDQQTQTKAKTT | | |
| | | | TNKAHAKAATTPEHNTDTTDSMKENSKEDKTTRD | | |
| | | | PSSKATTKQENTSKGTTATNLGNNTEAGARTPPT | | |
| | | | TTPTRHTTEPATSTAGGHTKARTTRWKSTAARQP | | |
| | | | TRNNTTADTKTAQSKQTTPAQLGNNTTPENTTPP | | |
| | | | DNKSNSQTNVAPTEEIEIGSSLWRRRYVYGPCRE | | |
| | | | NALEHPMNPCLKDNTTWIYLDNGRNLPAGYYDSK | | |
| | | | TDKIICYGIYRGNSYCYGRIECTCKNGTGLLSYC | | |
| | | | CNSYNWS | | |
| LC168749 | 7239-9196 | gb: LC168749: | MSSPRDRVNAFYKDNLQFKNTRVVLNKEQLLIER | 2 | 101 |
| | | 7239-9196\|Organism: | PYMLLAVLFVMFLSLVGLLAIAGIRLHRAAVNTA | | |
| | | Rinderpest morbilli- | EINSGLTTSIDITKSIEYQVKDVLTPLFKIIGDE | | |
| | | virus\|Strain Name: | VGLRTPQRFTDLTKFISDKIKFLNPDKEYDFRDI | | |
| | | Lv\|Protein Name: | NWCISPPERIKINYDQYCAHTAAEELITMLVNSS | | |
| | | H protein\|Gene Symbol: | LAGTAVLRTSLVNLGRSCTGSTTTKGQFSNMSLA | | |
| | | H | LSGIYSGRGYNISSMITITEKGMYGSTYLVGKHN | | |
| | | | QGARRPSTAWQRDYRVFEVGIIRELGVGTPVFHM | | |
| | | | TNYLELPRQPELEICMLALGEFKLAALCLADNSV | | |
| | | | ALHYGGLRDDHKIRFVKLGVWPSPADSDTLATLS | | |
| | | | AVDPTLDGLYITTHRGIIAAGKAVWAVPVTRTDD | | |
| | | | QRKMGQCRREACREKPPPFCNSTDWEPLEAGRIP | | |
| | | | AYGILTIRLGLADKPEIDIISEFGPLITHDSGMD | | |
| | | | LYTPLDGNEYWLTIPPLQNSALGTVNTLVLEPSL | | |
| | | | KISPNILTLPIRSGGGDCYTPTYLSDLADDDVKL | | |
| | | | SSNLVILPSRNLQYVSATYDTSRVEHAIVYYIYS | | |
| | | | TGRLSSYYYPVKLPIKGDPVSLQIGCFPWGLKLW | | |
| | | | CHHFCSVIDSGTGKQVTHTGAVGIEITCNSR | | |
| LC187310 | 8144-9871 | gb: LC187310: | MDSSQMNILDAMDRESSKRTWRGVFRVTTIIMVV | 2 | 102 |
| | | 8144-9871\|Organism: | TCVVLSAITLSKVAHPQGFDTNELGNGIVDRVSD | | |
| | | Avian paramyxovirus | KITEALTVPNNQIGEIFKIVALDLHVLVSSSQQA | | |
| | | 10\|Strain Name: | IAGQIGMLAESINSILSQNGSASTILSSSPEYAG | | |
| | | APMV-10-FI324/YmHA\| | GIGVPLFSNKLTNGTVIKPITLIEHPSFIPGPTT | | |
| | | Protein Name: | IGGCTRIPTFHMASSHWCYSHNIIEKGCKDSGIS | | |
| | | hemagglutinin- | SMYISLGVLQVLKKGTPVFLVTASAVLSDDRNRK | | |
| | | neuraminidase\|Gene | SCSITSSRFGCEILCSLVTEAESDDYKSDTPTGM | | |
| | | Symbol: HN | VHGRLYFNGTYREGLVDTETIFRDFSANYPGVGS | | |
| | | | GEIVEGHIHFPIYGGVKQNTGLYNSLTPYWLDAK | | |
| | | | NKYDYCKLPYTNQTIQNSYKPPFIHGRFWAQGIL | | |
| | | | SCELDLFNLGNCNLKIIRSDKVMMGAESRLMLVG | | |
| | | | SKLLMYQRASSWWPLGITQEIDIAELHSSNTTIL | | |
| | | | REVKPILSSKFPRPSYQPNYCTKPSVCPAVCVTG | | |
| | | | VYTDMWPISITGNISDYAWISHYLDAPTSRQQPR | | |
| | | | IGIANQYFWIHQTTIFPTNTQSSYSTTTCFRNQV | | |
| | | | RSRMFCLSIAEFADGVFGEFRIVPLLYELRV | | |
| NC_004074 | 6590-8563 | gb: NC_004084: | MWATSESKAPIPANSTLNLVDVPLDEPQTITKHR | 2 | 103 |
| | | 6590-8563\|Organism: | KQKRTGRLVFRLLSLVLSLMTVILVLVILASWSQ | | |
| | | Tioman virus\|Strain | KINACATKEGFNSLDLQISGLVKSINSLITEVNQ | | |
| | | Name: UNKNOWN- | ISITTAINLPIKLSDFGKSIVDQVTQMIRQCNAV | | |
| | | NC_004074\|Protein | CKGPGEKPGIQNIRINIPNNFSTYLELNNTVKSI | | |
| | | Name: attachment | ELQRRPALLARPNPIPKSCSRFPSYSVNFGIHCF | | |
| | | protein\|Gene Symbol: | AHAITDQSCELSDKTYYRLAIGISDKNLSDPSDV | | |
| | | HN | KYIGEAFTPMGLQARGCSVISSIYGCYLLCSKSN | | |
| | | | QGYEADFQTQGFHQMYILFLSRDLKTTLFNDMIS | | |
| | | | STTVVWNGLYPGEGAGIWHMGYLIFPLWGGIKIG | | |
| | | | TPASTSILNSTLDLPLVGPSCKSTLEENNLINKD | | |
| | | | VLFSPYFGESVMVFGFLSCYMLSNVPTHCQVEVL | | |
| | | | NSSVLGFGSRSQLMDLKGIVYLYIQSAGWYSYTQ | | |
| | | | LFRLSLQSRGYKLTVKQIRRIPISSTTRPGTAPC | | |
| | | | DVVHNCPYTCATGLFQAPWIVNGDSILDRDVRNL | | |
| | | | VFVQAWSGNFNTFQKGLISICNQYTCPLTTLLDN | | |
| | | | DNSIMRSTTTYCYPSLSEYNLQCQSFIEWGGPVG | | |
| | | | NPIGILEVHYIIKFK | | |
| NC_005283 | 7091-8905 | gb: NC_005283: | MSSPRDKVDAFYKDIPRPRNNRVLLDNERVIIER | 2 | 104 |
| | | 7091-8905\|Organism: | PLILVGVLAVMFLSLVGLLAIAGVRLQKATTNSI | | |
| | | Dolphin morbillivirus\| | EVNRKLSTNLETTVSIEHHVKDVLTPLFKIIGDE | | |
| | | Strain Name: UNKNOWN- | VGLRMPQKLTEIMQFISNKIKFLNPDREYDFNDL | | |
| | | NC_005283\|Protein | HWCVNPPDQVKIDYAQYCNHIAAEELIVTKFKEL | | |
| | | Name: haemagglutinin | MNHSLDMSKGRIFPPKNCSGSVITRGQTIKPGLT | | |
| | | protein\|Gene Symbol: H | LVNIYTTRNFEVSFMVTVISGGMYGKTYFLKPPE | | |
| | | | PDDPFEFQAFRIFEVGLVRDVGSREPVLQMTNFM | | |
| | | | VIDEDEGLNFCLLSVGELRLAAVCVRGRPVVTKD | | |
| | | | IGGYKDEPFKVVTLGIIGGGLSNQKTEIYPTIDS | | |
| | | | SIEKLYITSHRGIIRNSKARWSVPAIRSDDKDKM | | |
| | | | EKCTQALCKSRPPPSCNSSDWEPLTSNRIPAYAY | | |
| | | | IALEIKEDSGLELDITSNYGPLIIHGAGMDIYEG | | |
| | | | PSSNQDWLAIPPLSQSVLGVINKVDFTAGFDIKP | | |
| | | | HTLTTAVDYESGKCYVPVELSGAKDQDLKLESNL | | |
| | | | VVLPTKDFGYVTATYDTSRSEHAIVYYVYDTARS | | |
| | | | SSYFFPFRIKARGEPIYLRIECFPWSRQLWCHHY | | |
| | | | CMINSTVSNEIVVVDNLVSINMSCSR | | |
| NC_007803 | 7978-12504 | gb: NC_007803: | MSQLAAHNLAMSNFYGTHQGDLSGSQKGEEQQVQ | 2 | 105 |
| | | 7978-12504\|Organism: | GVIRYVSMIVSLLSLFTIIALNVTNIIYMTESGG | | |
| | | Beilong virus\|Strain | TMQSIKTAQGSIDGSMREISGVIMEDVKPKTDLI | | |
| | | Name: Li\|Protein | NSMVSYNIPAQLSMIHQIIKNDVPKQCTPSFMFN | | |
| | | Name: attachment | NTICPLAENPTHSRYFEEVNLDSISECSGPDMHL | | |
| | | glycoprotein\|Gene | GLGVNPEFIEFPSFAPGSTKPGSCVRLPSFSLST | | |
| | | Symbol: G | TVFAYTHTIMGHGCSELDVGDHYFSVGRIADAGH | | |
| | | | EIPQFETISSWFINDKINRRSCTVAAGAMEAWMG | | |
| | | | CVIMTETFYDDRNSLDTGKLTISYLDVFGRKKEW | | |
| | | | IYTRSEILYDYTYTSVYFSVGSGVVVGDTVYFLI | | |
| | | | WGSLSSPIEETAYCFAPDCSNYNQRMCNEAQRPS | | |
| | | | KFGHRQMVNGILKFKTTSTGKPLLSVGTLSPSVV | | |
| | | | PFGSEGRLMYSEITKIIYLYLRSTSWHALPLTGL | | |
| | | | FVLGPPTSISWIVQRAVSRPGEFPCGASNRCPKD | | |
| | | | CVTGVYTDLFPLGSRYEYAATVYLNSETYRVNPT | | |
| | | | LALINQTNIIASKKVTTESQRAGYTTTTCFVFKL | | |
| | | | RVWCISVVELAPSTMTAYEPIPFLYQLDLTCKGK | | |
| | | | NGSLAMRFAGKEGTYKSGRYKSPRNECFFEKVSN | | |
| | | | KYYFIVSTPEGIQPYEIRDLTPDRMPHIIMYISD | | |
| | | | VCAPALSAFKKLLPAMRPITTLTIGNWQFRPVEV | | |
| | | | SGGLRVNIGRNLTKEGDLTMSAPEDPGSNTFPGN | | |
| | | | HIPGNGILDAGYYTVEYPKE | | |
| NC_009489 | 6559-8512 | gb: NC_009489: | MASLQSEPGSQKPHYQSDDQLVKRTWRSFFRFSV | 2 | 106 |
| | | 6559-8512\|Organism: | LVVTITSLALSIITLIGVNRISTAKQISNAFAAI | | |
| | | Mapuera virus\|Strain | QANILSSIPDIRPINSLLNQLVYTSSVTLPLRIS | | |
| | | Name: BeAnn 370284\| | SLESNVLAAIQEACTYRDSQSSCSATMSVMNDQR | | |
| | | Protein Name: | YIEGIQVYSGSFLDLQKHTLSPPIAFPSFIPTST | | |
| | | attachment protein\| | TTVGCTRIPSFSLTKTHWCYTHNYIKTGCRDATQ | | |
| | | Gene Symbol: HN | SNQYIALGTIYTDPDGTPGFSTSRSQYLNDGVNR | | |
| | | | KSCSISAVPMGCALYCFISVKEEVDYYKGTVPPA | | |
| | | | QTLILFFFNGTVHEHRIVPSSMNSEWVMLSPGVG | | |
| | | | SGVFYNNYIIFPLYGGMTKDKAEKRGELTRFFTP | | |
| | | | KNSRSLCKMNDSVFSNAAQSAYYPPYFSSRWIRS | | |
| | | | GLLACNWNQIITTNCEILTFSNQVMMMGAEGRLI | | |
| | | | LINDDLFYYQRSTSWWPRPLVYKLDIELNYPDSH | | |
| | | | IQRVDQVEVTFPTRPGWGGCVGNNFCPMICVSGV | | |
| | | | YQDVWPVTNPVNTTDSRTLWVGGTLLSNTTRENP | | |
| | | | ASVVTSGGSISQTVSWFNQTVPGAYSTTTCFNDQ | | |
| | | | VQGRIFCLIIFEVGGGLLGEYQIVPFLKELKYQG | | |
| | | | AVHA | | |
| NC_017937 | 6334-8544 | gb: NC_017937: | MAPINYPASYYTNNAERPVVITTKSTESKGQRPL | 2 | 107 |
| | | 6334-8544\|Organism: | PLGNARFWEYFGHVCGTLTFCMSLIGIIVGIIAL | | |
| | | Nariva virus\|Strain | ANYSSDKDWKGRIGGDIQVTRMATEKTVKLILED | | |
| | | Name: UNKNOWN- | TTPKLRNILDSVLFQLPKMLASIASKINTQTPPP | | |
| | | NC_017937\|Protein | PTTSGHSTALATQCSSNCENRPEIGYDYLRQVEQ | | |
| | | Name: attachment | SLQRITNISIQLLEASEIHSMAGAYPNALYKIRT | | |
| | | protein\|Gene Symbol: H | QDSWSVTAKECPLQAFQPNLNLIPAMIGTATGAL | | |
| | | | IRNCVRQPVIVVDDGVYMLTYLAMRGSCQDHQKS | | |
| | | | VRHFEMGVITSDPFGDPVPTPLRHWTKRALPAYD | | |
| | | | GCALAVKGHAGFALCTETSVGPLRDRTAKRKPNI | | |
| | | | VLFKASLVGELSERVIPPQSWLSGFSFFSVYTVA | | |
| | | | GKGYAYHSKFHAFGNVVRVGQSEYQAKCRGTGCP | | |
| | | | TANQDDCNTAQRVSQEDNTYLHQAILSVDIDSVI | | |
| | | | DPEDVVYVIERDQYYQASAGDLYRVPETGEILYN | | |
| | | | LHNGGWSNEVQVGRIQPSDRFYMREIQLTSTRVP | | |
| | | | APNGCNRVKGCPGGCVAVISPAFTPMHPEFNVGV | | |
| | | | GIFPMNQPHNPSIMHVQQQTELFWKPIVGGNITL | | |
| | | | HESSIACYSTVPPNPSYDLCIGVMTLLLHQGQLP | | |
| | | | QFQALSWYQPTMCNGNAPQNRRALIPVIVEDSKA | | |
| | | | MSVSSDAPRTP | | |
| NC_025256 | 9117-11015 | gb: NC025256: | MPQKTVEFINMNSPLERGVSTLSDKKTLNQSKIT | 2 | 108 |
| | | 9117-11015\|Organism: | KQGYFGLGSHSERNWKKQKNQNDHYMTVSTMILE | | |
| | | Bat Paramyxovirus | ILVVLGIMFNLIVLTMVYYQNDNINQRMAELTSN | | |
| | | Eid_hel/GH-M74a/GHA/ | ITVLNLNLNQLTNKIQREIIPRITLIDTATTITI | | |
| | | 2009\|Strain Name: | PSAITYILATLTTRISELLPSINQKCEFKTPTLV | | |
| | | BatPV/Eid_hel/GH- | LNDCRINCTPPLNPSDGVKMSSLATNLVAHGPSP | | |
| | | M74a/GHA/2009\|Protein | CRNFSSVPTIYYYRIPGLYNRTALDERCILNPRL | | |
| | | Name: glycoprotein\| | TISSTKFAYVHSEYDKNCTRGFKYYELMTFGEIL | | |
| | | Gene Symbol: G | EGPEKEPRMFSRSFYSPTNAVNYHSCTPIVTVNE | | |
| | | | GYFLCLECTSSDPLYKANLSNSTFHLVILRHNKD | | |
| | | | EKIVSMPSFNLSTDQEYVQIIPAEGGGTAESGNL | | |
| | | | YFPCIGRLLHKRVTHPLCKKSNCSRTDDESCLKS | | |
| | | | YYNQGSPQHQVVNCLIRIRNAQRDNPTWDVITVD | | |
| | | | LTNTYPGSRSRIFGSFSKPMLYQSSVSWHTLLQV | | |
| | | | AEITDLDKYQLDWLDTPYISRPGGSECPFGNYCP | | |
| | | | TVCWEGTYNDVYSLTPNNDLFVTVYLKSEQVAEN | | |
| | | | PYFAIFSRDQILKEFPLDAWISSARTTTISCFMF | | |
| | | | NNEIWCIAALEITRLNDDIIRPIYYSFWLPTDCR | | |
| | | | TPYPHTGKMTRVPLRSTYNY | | |
| NC_025347 | 6398-8418 | gb: NC_025347: | MESIGKGTWRTVYRVLTILLDVVIIILSVIALIS | 2 | 109 |
| | | 6398-8418\|Organism: | LGLKPGERIINEVNGSIHNQLVPLSGITSDIQAK | | |
| | | Avian paramyxovirus | VSSIYRSNLLSIPLQLDQINQAISSSARQIADTI | | |
| | | 7\|Strain Name: APMV- | NSFLALNGSGTFIYTNSPEFANGFNRAMFPTLNQ | | |
| | | 7/dove/Tennessee/4/ | SLNMLTPGNLIEFTNFIPTPTTKSGCIRIPSFSM | | |
| | | 75\|\|Protein Name: | SSSHWCYTHNIIASGCQDHSTSSEYISMGVVEVT | | |
| | | hemagglutinin- | DQAYPNFRTTLSITLADNLNRKSCSIAATGFGCD | | |
| | | neuraminidase\|Gene | ILCSVVTETENDDYQSPEPTQMIYGRLFFNGTYS | | |
| | | Symbol: HN | EMSLNVNQMFADWVANYPAVGSGVELADFVIFPL | | |
| | | | YGGVKITSTLGASLSQYYYIPKVPTVNCSETDAQ | | |
| | | | QIEKAKASYSPPKVAPNIWAQAVVRCNKSVNLAN | | |
| | | | SCEILTFNTSTMMMGAEGRLLMIGKNVYFYQRSS | | |
| | | | SYWPVGIIYKLDLQELTTFSSNQLLSTIPIPFEK | | |
| | | | FPRPASTAGVCSKPNVCPAVCQTGVYQDLWVLYD | | |
| | | | LGKLENTTAVGLYLNSAVGRMNPFIGIANTLSWY | | |
| | | | NTTRLFAQGTPASYSTTTCFKNTKIDTAYCLSIL | | |
| | | | ELSDSLLGSWRITPLLYNITLSIMS | | |
| NC_025348 | 6590-8548 | gb: NC_025348: | MPPVPTVSQSIDEGSFTDIPLSPDDIKHPLSKKT | 2 | 110 |
| | | 6590-8548\|Organism: | CRKLFRIVTLIGVGLISILTIISLAQQTGILRKV | | |
| | | Tuhoko virus 2\|Strain | DSSDFQSYVQESFKQVLNLMKQFSSNLNSLIEIT | | |
| | | Name: UNKNOWN- | SVTLPFRIDQFGTDIKTQVAQLVRQCNAVCRGPI | | |
| | | NC_025348\|Protein | KGPTTQNIVYPALYETSLNKTLETKNVRIQEVRQ | | |
| | | Name: hemagglutinin- | EVDPVPGPGLSNGCTRNPSFSVYHGVWCYTHATS | | |
| | | neuraminidase\|Gene | IGNCNGSLGTSQLFRIGNVLEGDGGAPYHKSLAT | | |
| | | Symbol: HN | HLLTTRNVSRQCSATASYYGCYFICSEPVLTERD | | |
| | | | DYETPGIEPITIFRLDPDGNWVVFPNINRFTEYS | | |
| | | | LKALYPGIGSGVLFQGKLIFPMYGGIDKERLSAL | | |
| | | | GLGNIGLIERRMADTCNHTEKELGRSFPGAFSSP | | |
| | | | YYHDAVMLNFLLICEMIENLPGDCDLQILNPTNM | | |
| | | | SMGSESQLSVLDNELFLYQRSASWWPYTLIYRLN | | |
| | | | MRYTGKYLKPKSIIPMVIKSNTRPGYEGCNHERV | | |
| | | | CPKVCVTGVFQAPWILSIGRDHKERVSNVTYMVA | | |
| | | | WSMDKSDRTYPAVSVCGSDTCKLTVPLGDSKVHS | | |
| | | | AYSVTRCYLSRDHMSAYCLVIFELDARPWAEMRI | | |
| | | | QSFLYKLILT | | |
| NC_025350 | 6451-8341 | gb: NC_025350: | MHNRTQSVSSIDTSSDVYLPRRKKAVTKFTFKKI | 2 | 111 |
| | | 6451-8341\|Organism: | FRVLILTLLLSIIIIIAVIFPKIDHIRETCDNSQ | | |
| | | Tuhoko virus 3\|Strain | ILETITNQNSEIKNLINSAITNLNVLLTSTTVDL | | |
| | | Name: UNKNOWN- | PIKLNNFGKSIVDQVTMMVRQCNAVCRGPGDRPT | | |
| | | NC_025350\|Protein | QNIELFKGLYHTSPPSNTSTKLSMITEASNPDDI | | |
| | | Name: hemagglutinin- | VPRPGKLLGCTRFPSFSVHYGLWCYGHMASTGNC | | |
| | | neuraminidase\|Gene | SGSSPSVQIIRIGSIGTNKDGTPKYVIIASASLP | | |
| | | Symbol: HN | ETTRLYHCSVTMTSIGCYILCTTPSVSETDDYST | | |
| | | | MGIEKMSISFLSLDGYLTQLGQPTGLDNQNLYAL | | |
| | | | YPGPGSGVIFRDFLIFPMMGGIRLMDAQKMLNRN | | |
| | | | ITYRGFPPSETCTESELKLKQEVANMLTSPYYGE | | |
| | | | VLVLNFLYVCSLLDNIPGDCSVQLIPPDNMTLGA | | |
| | | | ESRLYVLNGSLIMYKRGSSWWPYTELYQINYRVN | | |
| | | | NRAFRVRESVRINTTSTSRPGVQGCNLEKVCPKV | | |
| | | | CVSGIYQSPGIISAPVNPTRQEEGLLYFLVWTSS | | |
| | | | MSSRTGPLSSLCDHSTCRITYPIGDDTIFIGYTD | | |
| | | | SSCFMSSIKEGIYCIAFLELDNQPYSMMAIRSLS | | |
| | | | YIIN | | |
| NC_025352 | 8716-11257 | gb: NC_025352: | MATNRDNTITSAEVSQEDKVKKYYGVETAEKVAD | 2 | 112 |
| | | 8716-11257\|Organism: | SISGNKVFILMNTLLILTGAIITITLNITNLTAA | | |
| | | Mojiang virus\|Strain | KSQQNMLKIIQDDVNAKLEMFVNLDQLVKGEIKP | | |
| | | Name: tongguan1\| | KVSLINTAVSVSIPGQISNLQTKFLQKYVYLEES | | |
| | | Protein Name: | ITKQCTCNPLSGIFPTSGPTYPPTDKPDDDTTDD | | |
| | | attachment glyco- | DKVDTTIKPIEYPKPDGCNRTGDHFTMEPGANFY | | |
| | | protein\|Gene Symbol: G | TVPNLGPASSNSDECYTNPSFSIGSSIYMFSQEI | | |
| | | | RKTDCTAGEILSIQIVLGRIVDKGQQGPQASPLL | | |
| | | | VWAVPNPKIINSCAVAAGDEMGWVLCSVTLTAAS | | |
| | | | GEPIPHMFDGFWLYKLEPDTEVVSYRITGYAYLL | | |
| | | | DKQYDSVFIGKGGGIQKGNDLYFQMYGLSRNRQS | | |
| | | | FKALCEHGSCLGTGGGGYQVLCDRAVMSFGSEES | | |
| | | | LITNAYLKVNDLASGKPVIIGQTFPPSDSYKGSN | | |
| | | | GRMYTIGDKYGLYLAPSSWNRYLRFGITPDISVR | | |
| | | | STTWLKSQDPIMKILSTCTNTDRDMCPEICNTRG | | |
| | | | YQDIFPLSEDSEYYTYIGITPNNGGTKNFVAVRD | | |
| | | | SDGHIASIDILQNYYSITSATISCFMYKDEIWCI | | |
| | | | AITEGKKQKDNPQRIYAHSYKIRQMCYNMKSATV | | |
| | | | TVGNAKNITIRRY | | |
| NC_025362 | 6503-8347 | gb: NC_025363: | MESATSQVSFENDKTSDRRTWRAVFRVLMIILAL | 2 | 113 |
| | | 6503-8347\|Organism: | SSLCVTVAALIYSAKAAIPGNIDASEQRILSSVE | | |
| | | Avian paramyxovirus | AVQVPVSRLEDTSQKIYRQVILEAPVTQLNMETN | | |
| | | 12\|Strain Name: | ILNAITSLSYQIDASANSSGCGAPVHDSDFTGGV | | |
| | | Wigeion/Italy/3920_1/ | GRELLQEAEVNLTIIRPSKFLEHLNFIPAPTTGN | | |
| | | 2005\|Protein Name: | GCTRIPSFDLGQTHWCYTHNVVLNGCRDRGHSFQ | | |
| | | hemagglutinin- | YVALGILRTSATGSVFLSTLRSVNLDDDRNRKSC | | |
| | | neuraminidase\|Gene | SVSATPIGCEMLCSLVTETEEGDYDSIDPTPMVH | | |
| | | Symbol: HN | GRLGFDGKYREVDLSEKEIFADWRANYPAVGGGA | | |
| | | | FFGNRVWFPVYGGLKEGTQSERDAEKGYAIYKRF | | |
| | | | NNTCPDDNTTQIANAKASYRPSRFGGRFIQQGIL | | |
| | | | SFKVEGNLGSDPILSLTDNSITLMGAEARVMNIE | | |
| | | | NKLYLYQRGTSWFPSALVYPLDVANTAVKVRAPY | | |
| | | | IFDKFTRPGGHPCSASSRCPNVCVTGVYTDAYPL | | |
| | | | VFSRSHDIVAVYGMQLAAGTARLDPQAAIWYGNE | | |
| | | | MSTPTKVSSSTTKAAYTTSTCFKVTKTKRIYCIS | | |
| | | | IAEIGNTLFGEFRIVPLLIEVQKTPLTRRSELRQ | | |
| | | | QMPQPPIDLVIDNPFCAPSGNLSRKNAIDEYANS | | |
| | | | WP | | |
| NC_025373 | 6619-8605 | gb: NC_025373: | MEPTGSKVDIVPSQGTKRTCRTFYRLLILILNLI | 2 | 114 |
| | | 6619-8605\|Organism: | IIILTIISIYVSISTDQHKLCNNEADSLLHSIVE | | |
| | | Avian paramyxovirus | PITVPLGTDSDVEDELREIRRDTGINIPIQIDNT | | |
| | | 3\|Strain Name: turkey/ | ENIILTTLASINSNIARLHNATDESPTCLSPVND | | |
| | | Wisconsin/68\|Protein | PRFIAGINKITKGSMIYRNFSNLIEHVNFIPSPT | | |
| | | Name: hemagglutinin- | TLSGCTRIPSFSLSKTHWCYSHNVISTGCQDHAA | | |
| | | neuraminidase\|Gene | SSQYISIGIVDTGLNNEPYLRTMSSRLLNDGLNR | | |
| | | Symbol: HN | KSCSVTAGAGVCWLLCSVVTESESADYRSRAPTA | | |
| | | | MILGRFNFYGDYTESPVPASLFSGRFTANYPGVG | | |
| | | | SGTQLNGTLYFPIYGGVVNDSDIELSNRGKSFRP | | |
| | | | RNPTNPCPDPEVTQSQRAQASYYPTRFGRLLIQQ | | |
| | | | AILACRISDTTCTDYYLLYFDNNQVMMGAEARIY | | |
| | | | YLNNQMYLYQRSSSWWPHPLFYRFSLPHCEPMSV | | |
| | | | CMITDTHLILTYATSRPGTSICTGASRCPNNCVD | | |
| | | | GVYTDVWPLTEGTTQDPDSYYTVFLNSPNRRISP | | |
| | | | TISIYSYNQKISSRLAVGSEIGAAYTTSTCFSRT | | |
| | | | DTGALYCITIIEAVNTIFGQYRIVPILVQLISD | | |
| NC_025386 | 7541-9403 | gb: NC_025386: | MKAMHYYKNDFADPGTNDNSSDLTTNPFISNQIK | 2 | 115 |
| | | 7541-9403\|Organism: | SNLSPPVLAEGHLSPSPIPKFRKILLTISFVSTI | | |
| | | Salem virus\|Strain | VVLTVILLVLTIRILTIIEASAGDEKDIHTILSS | | |
| | | Name: UNKNOWN- | LLNTFMNEYIPVFKNLVSIISLQIPQMLIDLKTS | | |
| | | NC_025386\|Protein | STQMMQSLKTFPRDLETLSTVTQSVAVLLEKAKS | | |
| | | Name: attachment | TIPDINKFYKNVGKVTFNDPNIKVLTLEVPAWLP | | |
| | | glycoprotein\|Gene | IVRQCLKQDFRQVISNSTGFALIGALPSQLFNEF | | |
| | | Symbol: G | EGYPSLAIVSEVYAITYLKGVMFENQENFLYQYF | | |
| | | | EIGTISPDGYNKPYFLRHTSVMLSTFKLSGKCTA | | |
| | | | AVDYRGGIFLCTPSPKIPKILQNPPDLPTLTVVS | | |
| | | | IPFDGRYTIRNISLMLTDEADIIYDLDTLQGRGV | | |
| | | | LQAMRFYALVRVISSSSPRHFPFCKNSWCPTADD | | |
| | | | KICDQSRRLGADGNYPVMYGLISIPAHSSYQGNV | | |
| | | | SLKLIDPKYYAYTRDASLFYNSMTDTYHYSFGTR | | |
| | | | GWVSRPIIGELLLGDDIVLTRYTVRSVSRATAGD | | |
| | | | CTTVSMCPQACSGGMNSIFYPLNFDKPQVTGVAI | | |
| | | | RQYERQQEGIIVVTMNDHYYYSVPIIKNGTLLIS | | |
| | | | SVTDCFWLMGDLWCMSLMEKNNLPLGVRSLAHLT | | |
| | | | WNIHWSCS | | |
| NC_025390 | 6647-8386 | gb: NC_025396: | MESGISQASLVNDNIELRNTWRTAFRVVSLLLGF | 2 | 116 |
| | | 6647-8386\|Organism: | TSLVLTACALHFALNAATPADLSSIPVAVDQSHH | | |
| | | Avian paramyxovirus | EILQTLSLMSDIGNKIYKQVALDSPVALLNTEST | | |
| | | 9\|Strain Name: duck/ | LMSAITSLSYQINNAANNSGCGAPVHDKDFINGV | | |
| | | New York/22/1978\| | AKELFVGSQYNASNYRPSRFLEHLNFIPAPTTGK | | |
| | | Protein Name: | GCTRIPSFDLAATHWCYTHNVILNGCNDHAQSYQ | | |
| | | hemagglutinin- | YISLGILKVSATGNVFLSTLRSINLDDDENRKSC | | |
| | | neuraminidase\|Gene | SISATPLGCDLLCAKVTEREEADYNSDAATRLVH | | |
| | | Symbol: HN | GRLGFDGVYHEQALPVESLFSDWVANYPSVGGGS | | |
| | | | YFDNRVWFGVYGGIRPGSQTDLLQSEKYAIYRRY | | |
| | | | NNTCPDNNPTQIERAKSSYRPQRFGQRLVQQAIL | | |
| | | | SIRVEPSLGNDPKLSVLDNTVVLMGAEARIMTFG | | |
| | | | HVALMYQRGSSYFPSALLYPLSLTNGSAAASKPF | | |
| | | | IFEQYTRPGSPPCQATARCPNSCVTGVYTDAYPL | | |
| | | | FWSEDHKVNGVYGMMLDDITSRLNPVAAIFDRYG | | |
| | | | RSRVTRVSSSSTKAAYTTNTCFKVVKTKRVYCLS | | |
| | | | IAEIENTLFGEFRITPLLSEIIFDPNLEPSDTSR | | |
| | | | N | | |
| NC_025403 | 6692-8645 | gb: NC_025403: | MATNLSTITNGKFSQNSDEGSLTELPFFEHNRKV | 2 | 117 |
| | | 6692-8645\|Organism: | ATTKRTCRFVFRSVITLCNLTILIVTVVVLFQQA | | |
| | | Achimota virus 1\| | GFIKRTESNQVCETLQNDMHGVVTMSKGVITTLN | | |
| | | Strain Name: UNKNOWN- | NLIEITSVNLPFQMKQFGQGIVTQVTQMVRQCNA | | |
| | | NC_025403\|Protein | VCKGPTIGPDIQNIVYPASYESMIKHPVNNSNIL | | |
| | | Name: attachment | LSEIRQPLNFVPNTGKLNGCTRTPSFSVYNGFWC | | |
| | | protein\|Gene Symbol: | YTHAESDWNCNGSSPYMQVFRVGVVTSDYDYNVI | | |
| | | HN | HKTLHTKTSRLANVTYQCSTISTGYECYFLCSTP | | |
| | | | NVDEITDYKTPGIESLQIYKIDNRGTFAKFPITD | | |
| | | | QLNKELLTALYPGPGNGVLYQGRLLFPMHGGMQS | | |
| | | | SELNKVNLNNTVLSQFNDNKGCNATEIKLESEFP | | |
| | | | GTFTSPYYSNQVMLNYILICEMIENLPGNCDLQI | | |
| | | | VAPKNMSMGSESQLYSINNKLYLYQRSSSRWPYP | | |
| | | | LIYEVGTRLTNRQFRLRAINRFLIKSTTRPGSEG | | |
| | | | CNIYRVCPKVCVTGVYQAPWILHVSKAGSQSIAK | | |
| | | | VLYAVAWSKDHMSRKGPLFSICDNDTCFLTKSLA | | |
| | | | SEHVHSGYSITRCYLENSERHIICVVIMELDASP | | |
| | | | WAEMRIQSVIYNITLPS | | |
| NC_025402 | 6655-8586 | gb: NC_025404: | MDNSMSISTISLDAQPRIWSRHESRRTWRNIFRI | 2 | 118 |
| | | 6655-8586\|Organism: | TSLVLLGVTVIICIWLCCEVARESELELLASPLG | | |
| | | Achimota virus 2\| | ALIMAINTIKSSVVKMTTELNQVTFTTSIILPNK | | |
| | | Strain Name: UNKNOWN- | VDQFGQNVVSQVAQLVKQCNAVCRGHQDTPELEQ | | |
| | | NC_025404\|Protein | FINQKNPTWILQPNYTTKLTNLHEIDSIIPLVDY | | |
| | | Name: attachment | PGFSKSCTRFPSFSEGSKFWCFTYAVVKEPCSDI | | |
| | | protein: Gene Symbol: | SSSIQVVKYGAIKANHSDGNPYLVLGTKVLDDGK | | |
| | | HN | FRRGCSITSSLYGCYLLCSTANVSEVNDYAHTPA | | |
| | | | YPLTLELISKDGITTDLSPTYTVQLDKWSALYPG | | |
| | | | IGSGVIFKGYLMFPVYGGLPFKSPLISASWVGPG | | |
| | | | NKWPVDFSCSEDQYSTFNFSNPYSALYSPHFSNN | | |
| | | | IVVSALFVCPLNENLPYSCEVQVLPQGNLTIGAE | | |
| | | | GRLYVIDQDLYYYQRSTSWWPYLQLYKLNIRITN | | |
| | | | RVFRVRSLSLLPIKSTTRPGYGNCTYFKLCPHIC | | |
| | | | VTGVYQSPWLISIRDKRPHEEKNILYFIGWSPDE | | |
| | | | QIRQNPLVSLCHETACFINRSLATNKTHAGYSES | | |
| | | | HCVQSFERNKLTCTVFYELTAKPWAEMRVQSLLF | | |
| | | | QVDFL | | |
| NC_025410 | 6799-8869 | gb: NC_025410: | MDSRSDSFTDIPLDNRIERTVTSKKTWRSIFRVT | 2 | 119 |
| | | 6799-8869\|Organism: | AIILLIICVVVSSISLNQHNDAPLNGAGNQATSG | | |
| | | Tuhoko virus 1\| | FMDAIKSLEKLMSQTINELNQVVMTTSVQLPNRI | | |
| | | Strain Name: UNKNOWN- | TKFGQDILDQVTQMVRQCNAVCRGPGVGPSIQNY | | |
| | | NC_025410\|Protein | VIQGHAPTVSFDPISAEYQKFVFGITEKTLITAY | | |
| | | Name: hemagglutinin- | HNPWECLRFPSQHLFDTTWCVSYQILTQNCSDHG | | |
| | | neuraminidase\|Gene | PRITVIQLGEIMIANNLSTVFRDPVIKYIRHHIW | | |
| | | Symbol: HN | LRSCSVVAYYSQCTIFCTSTNKSEPSDYADTGYE | | |
| | | | QLFLATLQSDGTFTEHSMHGVNIVHQWNAIYGGV | | |
| | | | GNGVIIGRNMLIPLYGGINYYDHNTTIVQTVDLR | | |
| | | | PYPIPDSCSQTDNYQTNYLPSMFTNSYYGTNLVV | | |
| | | | SGYLSCRLMAGTPTSCSIRVIPIENMTMGSEGQF | | |
| | | | YLINNQLYYYKRSSNWIRDTQVYLLSYSDKGNII | | |
| | | | EITSAERYIFKSVTSPDEGDCVTNHGCPSNCIGG | | |
| | | | LFQAPWILNDFKLCGSNITCPKIVTVWADQPDKR | | |
| | | | SNPMLSIAETDKLLLHKSYINYHTAVGYSTVLCF | | |
| | | | DSPKLNLKTCVVLQELMSDDKLLIRISYSIVSIM | | |
| | | | VE | | |
| NC_028249 | 7059-9010 | gb: NC_028249: | MFSHQDKVGAFYKNNARANSSKLSLVTDEVEERR | 2 | 120 |
| | | 7059-9010\|Organism: | SPWFLSILLILLVGILILLAITGIRFHQVVKSNL | | |
| | | Phocine distemper | EFNKLLIEDMEKTKAVHHQVKDVLTPLFKIIGDE | | |
| | | virus\|Strain Name: | VGLRLPQKLNEIKQFIVQKTNFFNPNREFDFREL | | |
| | | PDV/Wadden_Sea.NLD/ | HWCINPPSKVKVNFTQYCEITEFKEATRSVANSI | | |
| | | 1988\|Protein Name: | LLLTLYRGRDDIFPPYKCRGATTSMGNVFPLAVS | | |
| | | hemagglutinin- | LSMSLISKPSEVINMLTAISEGIYGKTYLLVTDD | | |
| | | neuraminidase\|Gene | TEENFETPEIRVFEIGFINRWLGDMPLFQTTNYR | | |
| | | Symbol: HN | IISNNSNTKICTIAVGELALASLCTKESTILLNL | | |
| | | | GDEESQNSVLVVILGLFGATHMDQLEEVIPVAHP | | |
| | | | SIEKIHITNHRGFIKDSVATWMVPALALSEQGEQ | | |
| | | | INCLRSACKRRTYPMCNQTSWEPFGDKRLPSYGR | | |
| | | | LTLSLDVSTDLSINVSVAQGPIIFNGDGMDYYEG | | |
| | | | TLLNSGWLTIPPKNGTILGLINQASKGDQFIVTP | | |
| | | | HILTFAPRESSTDCHLPIQTYQIQDDDVLLESNL | | |
| | | | VVLPTQSFEYVVATYDVSRSDHAIVYYVYDPART | | |
| | | | VSYTYPFRLRTKGRPDILRIECFVWDGHLWCHQF | | |
| | | | YRFQLDATNSTSVVENLIRIRFSCDRLDP | | |
| NC_028362 | 6951-8675 | gb: NC_028362: | MEYWGHTNNPDKINRKVGVDQVRDRSKTLKIITF | 2 | 121 |
| | | 6951-8675\|Organism: | IISMMTSIMSTVALILILIMFIQNNNNNRIILQE | | |
| | | Caprine parainfluenza | LRDETDAIEARIQKASNDIGVSIQSGINTRLLTI | | |
| | | virus 3\|Strain Name: | QNHVQNYIPLALTQQVSSLRESINDVITKREETQ | | |
| | | JS2013\|Protein Name: | SKMPIQRMTHDDGIEPLIPDNFWKCPSGIPTISA | | |
| | | hemagglutinin- | SPKIRLIPGPGLLATSTTINGCIRLPSLVINNLI | | |
| | | neuraminidase\|Gene | YAYTSNLITQGCQDIGKSYQVLQIGIITINSDLV | | |
| | | Symbol: HN | PDLNPRITHTFDIDDNRKSCSLALRNADVYQLCS | | |
| | | | TPKVDERSDYSSIGIEDIVLDIVTSEGTVSTTRF | | |
| | | | TNNNITFDKPYAALYPSVGPGIYYDNKIIFLGYG | | |
| | | | GLEHEENGDVICNITGCPGKTQHDCNQASYSPWF | | |
| | | | SNRRMVNAIILVNKGLNKVPSLQVWTIPMRQNYW | | |
| | | | GSEGRLLLLGNKIYIYTRSTSWHSKLQLGTLDIS | | |
| | | | NYNDIRIRWTHHDVLSRPGSEECPWGNTCPRGCI | | |
| | | | TGVYNDAYPLNPSGSVVSSVILDSRTSRENPIIT | | |
| | | | YSTDTSRVNELAIRNNTLSAAYTTTNCVTHYGKG | | |
| | | | YCFHIIEINHKSLNTLQPMLFKTEIPKSCN | | |
| AB548428 | 5999-7261 | gb: AB548428: | MGSELYIIEGVSSSEIVLKQVLRRSKKILLGLVL | 1 | 122 |
| | | 5999-7261\|Organism: | SALGLTLTSTIVISICISVEQVKLRQCVDTYWAE | | |
| | | Avian metapneumovirus\| | NGSLHPGQSTENTSTRGKTTTKDPRRLQATGAGK | | |
| | | Strain Name: VCO3/ | FESCGYVQVVDGDMHDRSYAVLGGVDCLGLLALC | | |
| | | 60616\|Protein Name: | ESGPICQGDTWSEDGNFCRCTFSSHGVSCCKKPK | | |
| | | attachment glyco- | SKATTAQRNSKPANSKSTPPVHSDRASKEHNPSQ | | |
| | | protein\|Gene Symbol: G | GEQPRRGPTSSKTTIASTPSTEDTAKPTISKPKL | | |
| | | | TIRPSQRGPSGSTKAASSTPSHKTNTRGTSKTTD | | |
| | | | QRPRTGPTPERPRQTHSTATPPPTTPIHKGRAPT | | |
| | | | PKPTTDLKVNPREGSTSPTAIQKNPTTQSNLVDC | | |
| | | | TLSDPDEPQRICYQVGTYNPSQSGTCNIEVPKCS | | |
| | | | TYGHACMATLYDTPFNCWRRTRRCICDSGGELIE | | |
| | | | WCCTSQ | | |
| AF079780 | 8118-10115 | gb: AF079780\| | MDYHSHTTQTGSNETLYQDPLQSQSGSRDTLDGP | 1 | 123 |
| | | Organism: Tupaia | PSTLQHYSNPPPYSEEDQGIDGPQRSQPLSTPHQ | | |
| | | paramyxovirus\|Strain | YDRYYGVNIQHTRVYNHLGTIYKGLKLAFQILGW | | |
| | | Name: UNKNOWN- | VSVIITMIITVTTLKKMSDGNSQDSAMLKSLDEN | | |
| | | AF079780\|Protein | FDAIQEVANLLDNEVRPKLGVTMTQTTFQLPKEL | | |
| | | Name: hemagglutinin\| | SEIKRYLLRLERNCPVCGTEATPQGSKGNASGDT | | |
| | | Gene Symbol: H | AFCPPCLTRQCSEDSTHDQGPGVEGTSRNHKGKI | | |
| | | | NFPHILQSDDCGRSDNLIVYSINLVPGLSFIQLP | | |
| | | | SGTKHCIIDVSYTFSDTLAGYLIVGGVDGCQLHN | | |
| | | | KAIIYLSLGYYKTKMIYPPDYIAIATYTYDLVPN | | |
| | | | LRDCSIAVNQTSLAAICTSKKTKENQDFSTSGVH | | |
| | | | PFYIFTLNTDGIFTVTVIEQSQLKLDYQYAALYP | | |
| | | | ATGPGIFIGDHLVFLMWGGLMTKAEGDAYCQASG | | |
| | | | CNDAHRTSCNIAQMPSAYGHRQLVNGLLMLPIKE | | |
| | | | LGSHLIQPSLETISPKINWAGGHGRLYYNWEINT | | |
| | | | TYIYIEGKTWRSRPNLGITSWSKPLSIRWIDHSV | | |
| | | | ARRPGARPCDSANDCPEDCLVGGYYDMFPMSSDY | | |
| | | | KTAITIIPTHHQWPSSPALKLFNTNREVRVVMIL | | |
| | | | RPPNNVKKTTISCIRIMQTNWCLGFIIFKEGNNA | | |
| | | | WGQIYSYIYQVESTCPNTK | | |
| AY590688 | 6138-7935 | gb: AY590688: | MEVKVENVGKSQELKVKVKNFIKRSDCKKKLFAL | 1 | 124 |
| | | 6138-7935\|Organism: | ILGLVSFELTMNIMLSVMYVESNEALSLCRIQGT | | |
| | | Avian metapneumovirus\| | PAPRDNKTNTENATKETTLHTTTTTRDPEVRETK | | |
| | | Strain Name: Colorado\| | TTKPQANEGATNPSRNLTTKGDKHQTTRATTEAE | | |
| | | Protein Name: | LEKQSKQTTEPGTSTQKHTPTRPSSKSPTTTQAI | | |
| | | attachment glyco- | AQLTTPTTPKASTAPKNRQATTKKTETDTTTASR | | |
| | | protein\|Gene Symbol: G | ARNTNNPTETATTTPKATTETGKSKEGPTQHTTK | | |
| | | | EQPETTAGETTTPQPRRTASRPAPTTKIEEEAET | | |
| | | | TKTRTTKSTQTSTGPPRPTGGAPSGAATEGSGRA | | |
| | | | AAAGGPSAASAGGRRRTEAAAERDRRTRAGAGPT | | |
| | | | AGGARARTAAASERGADTAGSAGGGPGGDGATGG | | |
| | | | LSGGAPAEREDASGGTAAAGPGDGTEADGRAPPA | | |
| | | | AALAGRTTESAAGAAGDSGRAGTAGWGSAADGRS | | |
| | | | TGGNAAAEAGAAQSGRAAPRQPSGGTAPESTAPP | | |
| | | | NSGGSGRADAAPTEEVGVGSGLWRGRYVCGPCGE | | |
| | | | SVPEHPMNPCFGDGTAWICSDDGGSLPAGCYDGG | | |
| | | | TDGVVCCGVCGGNSCCCGRVECTCGGGAGLLSCC | | |
| | | | CGSYSWS | | |
| EU403085 | 6620-8593 | gb: EU403085: | MESPPSGKDAPAFREPKRTCRLCYRATTLSLNLT | 1 | 125 |
| | | 6620-8593\|Organism: | IVVLSIISIYVSTQTGANNSCVNPTIVTPDYLTG | | |
| | | Avian paramyxovirus | STTGSVEDLADLESQLREIRRDTGINLPVQIDNT | | |
| | | 3\|Strain Name: APMV3/ | ENLILTTLASINSNLRFLQNATTESQTCLSPVND | | |
| | | PKT/Netherland/449/ | PRFVAGINRIPAGSMAYNDFSNLIEHVNFIPSPT | | |
| | | 75\|Protein Name: | TLSGCTRIPSFSLSKTHWCYTHNVISNGCLDHAA | | |
| | | hemagglutinin- | SSQYISIGIVDTGLNNEPYFRTMSSKSLNDGLNR | | |
| | | neuraminidase\|Gene | KSCSVTAAANACWLLCSVVTEYEAADYRSRTPTA | | |
| | | Symbol: HN | MVLGRFDFNGEYTEIAVPSSLFDGRFASNYPGVG | | |
| | | | SGTQVNGTLYFPLYGGVLNGSDIETANKGKSFRP | | |
| | | | QNPKNRCPDSEAIQSFRAQDSYYPTRFGKVLIQQ | | |
| | | | AIIACRISNKSCTDFYLLYFDNNRVMMGAEARLY | | |
| | | | YLNNQLYLYQRSSSWWPHPLFYSISLPSCQALAV | | |
| | | | CQITEAHLTLTYATSRPGMSICTGASRCPNNCVD | | |
| | | | GVYTDVWPLTKNDAQDPNLFYTVYLNNSTRRISP | | |
| | | | TISLYTYDRRIKSKLAVGSDIGAAYTTSTCFGRS | | |
| | | | DTGAVYCLTIMETVNTIFGQYRIVPILLRVTSR | | |
| FJ977568 | 6139-7936 | gb: FJ977568: | MEVKVENVGKSQELKVKVKNFIKRSDCKKKLFAL | 1 | 126 |
| | | 6139-7936\|Organism: | ILGLVSFELTMNIMLSVMYVESNEALSLCRIQGT | | |
| | | Avian metapneumovirus\| | PAPRDNKTNTENATKETTLHTTTTTRDPEVRETK | | |
| | | Strain Name: aMPV/MN/ | TTKPQANEGATNPSRNLTTKGDKHQTTRATTEAE | | |
| | | turkey/2a/97\|Protein | LEKQSKQTTEPGTSTQKHTPARPSSKSPTTTQAT | | |
| | | Name: attachment | AQPTTPTAPKASTAPKNRQATTKKTETDTTTASR | | |
| | | glycoprotein\|Gene | ARNTNNPTETATTTPKATTETGKGKEGPTQHTTK | | |
| | | Symbol: G | EQPETTARETTTPQPRRTASRPAPTTKIEEEAET | | |
| | | | TKTRTTKNTQTSTGPPRPTRSTPSKTATENNKRT | | |
| | | | TTTKRPNTASTDSRQQTRTTAEQDQQTQTRAKPT | | |
| | | | TNGAHPQTTTTPEHNTDTTNSTKGSPKEDKTTRD | | |
| | | | PSSKTPTEQEDASKGTAAANPGGSAEADRRAPPA | | |
| | | | TTPTGRTTESAAGTTGDDSGAETTRRRSAADRRP | | |
| | | | TGGSTAAEAGTAQSGRATPKQPSGGTAAGNTAPP | | |
| | | | NNESSGRADAAPAEEAGVGPSIRRGRHACGPRRE | | |
| | | | SAPEHPTNPCPGDGTAWTRSDGGGNLPAGRHDSG | | |
| | | | ADGAARRGARGGNPRRRGRAERTRGGGAGPPSCR | | |
| | | | CGSHNRS | | |
| HG934339 | 5997-7166 | gb: HG934339: | MGAKLYAISGASDAQLMKKTCAKLLEKVVPIIIL | 1 | 127 |
| | | 5997-7166\|Organism: | AVLGITGTTTIALSISISIERAVLSDCTTQLRNG | | |
| | | Avian metapneumovirus | TTSGSLSNPTRSTTSTAVTTRDIRGLQTTRTREL | | |
| | | type D\|Strain Name: | KSCSNVQIAYGYLHDSSNPVLDSIGCLGLLALCE | | |
| | | Turkey/1985/Fr85.1\| | SGPFCQRNYNPRDRPKCRCTLRGKDISCCKEPPT | | |
| | | Protein Name: | AVTTSKTTPWGTEVHPTYPTQVTPQSQPATMAHQ | | |
| | | attachment glyco- | TATANQRSSTTEPVGSQGNTTSSNPEQQTEPPPS | | |
| | | protein\|Gene Symbol: G | PQHPPTTTSQDQSTETADGQEHTPTRKTPTATSN | | |
| | | | RRSPTPKRQETGRATPRNTATTQSGSSPPHSSPP | | |
| | | | GVDANMEGQCKELQAPKPNSVCKGLDIYREALPR | | |
| | | | GCDKVLPLCKTSTIMCVDAYYSKPPICFGYNQRC | | |
| | | | FCMETFGPIEFCCKS | | |
| JN032116 | 4659-5252 | gb: JN032116: | MSKNKNQRTARTLEKTWDTLNHLIVISSCLYKLN | 1 | 128 |
| | | 4659-5252\|Organism: | LKSIAQIALSVLAMIISTSLIIAAIIFIISANHK | | |
| | | Respiratory syncytial | VTLTTVTVQTIKNHTEKNITTYLTQVSPERVSPS | | |
| | | virus\|Strain Name: | KQPTTTPPIHTNSATISPNTKSEIHHTTAQTKGR | | |
| | | B/WI/629-12/06-07\| | TSTPTQNNKPNTKPRPKNPPKKDDYHFEVFNFVP | | |
| | | Protein Name: | CSICGNNQLCKSICKTIPSNKPRKNQP | | |
| | | attachment glyco- | | | |
| | | protein\|Gene Symbol: G | | | |
| KX258200 | 6254-7996 | gb: KX258200: | MEGSRTVIYQGDPNEKNTWRLVFRTLTLILNLAI | 1 | 129 |
| | | 6254-7996\|Organism: | LSVTIASIIITSKITLSEVTTLKTEGVEEVITPL | | |
| | | Avian paramyxovirus | MATLSDSVQQEKMIYKEVAISIPLVLDKIQTDVG | | |
| | | 14\|Strain Name: | TSVAQITDALRQIQGVNGTQAFALSNAPEYSGGI | | |
| | | APMV14/duck/Japan/ | EVPLFQIDSFVNKSMSISGLLEHASFIPSPTTLH | | |
| | | 11OG0352/2011\|Protein | GCTRIPSFHLGPRHWCYTHNIIGSRCRDEGFSSM | | |
| | | Name: hemagglutinin- | YISIGAITVNRDGNPLFITTASTILADDNNRKSC | | |
| | | neuraminidase protein\| | SIIASSYGCDLLCSIVTESENDDYANPNPTKMVH | | |
| | | Gene Symbol: HN | GRFLYNGSYVEQALPNSLFQDKWVAQYPGVGSGI | | |
| | | | TTHGKVLFPIYGGIKKNTQLFYELSKYGFFAHNK | | |
| | | | ELECKNMTEEQIRDIKAAYLPSKTSGNLFAQGII | | |
| | | | YCNISKLGDCNVAVLNTSTTMMGAEGRLQMMGEY | | |
| | | | VYYYQRSSSWWPVGIVYKKSLAELMNGINMEVLS | | |
| | | | FEPIPLSKFPRPTWTAGLCQKPSICPDVCVTGVY | | |
| | | | TDLFSVTIGSTTDKDTYFGVYLDSATERKDPWVA | | |
| | | | AADQYEWRNRVRLFESTTEAAYTTSTCFKNTVNN | | |
| | | | RVFCVSIVELRENLLGDWKIVPLLFQIGVSQGPP | | |
| | | | PK | | |
| KX940961 | 7978-12504 | gb: KX940961: | MSQLAAHNLAMSNFYGTHQGDLSGSQKGEEQQVQ | 1 | 130 |
| | | 7978-12504\|Organism: | GVIRYVSMIVGLLSLFTIIALNVTNIIYMTESGG | | |
| | | Beilong virus\|Strain | TMQSIKTAQGSIDGSMREISGVIMEDVKPKTDLI | | |
| | | Name: ERN081008_1S\| | NSMVSYNIPAQLSMIHQIIKNDVLKQCTPSFMFN | | |
| | | Protein Name: | NTICPLAENPTHSRYFEEVNLDSISECSGPDMHL | | |
| | | attachment glyco- | GLGVNPEFIEFPSFAPGSTKPGSCVRLPSFSLST | | |
| | | protein\|Gene Symbol: G | TVFAYTHTIMGHGCSELDVGDHYFSVGRIADAGH | | |
| | | | EIPQFETISSWFINDKINRRSCTVAAGAMEAWMG | | |
| | | | CVIMTETFYDDLNSLDTGKLTISYLDVFGRKKEW | | |
| | | | IYTRSEILYDYTYTSVYFSVGSGVVVGDTVYFLI | | |
| | | | WGSLSSPIEETAYCFAPDCSNYNQRMCNEAQRPS | | |
| | | | KFGHRQMVNGILKFKTTSTGKPLLSVGTLSPSVV | | |
| | | | PFGSEGRLMYSEITKIIYLYLRSTSWHALPLTGL | | |
| | | | FVLGPPTSISWIVQRAVSRPGEFPCGASNRCPKD | | |
| | | | CVTGVYTDLFPLGSRYEYAATVYLNSETYRVNPT | | |
| | | | LALINQTNIIASKKVTTESQRAGYTTTTCFVFKL | | |
| | | | RVWCISVVELAPSTMTAYEPIPFLYQLDLTCKGK | | |
| | | | NGSLAMRFTGKEGTYKSGRYKSPRNECFFEKVSN | | |
| | | | KYYFIVSTPEGIQPYEIRDLTPDRMPHIIMYISD | | |
| | | | VCAPALSAFKKLLPAMRPITTLTIGNWQFRPVEV | | |
| | | | SGGLRVSIGRNLTKEGDLTMSAPEDPGSNTFPGG | | |
| | | | HIPGNGLFDAGYYTVEYPKEWKQTTPKPSEGGNI | | |
| | | | IDKNKTPVIPSRDNPTSDSSIPHRESIEPVRPTR | | |
| | | | EVLKSSDYVTIVSTDSGSGSGDFATGVPWTGVSP | | |
| | | | KAPQNGINLPGTELPHPTVLDRINTPAPSDPKVS | | |
| | | | ADSDHTRDTIDPTALSKPLNHDTTGDTDTRINTG | | |
| | | | TATYGFTPGREATSSGKLANDLTNSTSVPSEAHP | | |
| | | | SASTSEASKPEKNTDNRVTQDPTSGTAERPTTNA | | |
| | | | PVDGKHSTQLTDARPNTADPERTSQHSSSTTRDE | | |
| | | | VKPSLPSTTEASTHQRTEAATPPELVNNTLNPPS | | |
| | | | TQVRSVRSLMQDAIAQAWNFVRGVTP | | |
| KY511044 | 6454-8310 | gb: KY511044: | MERGISEVALANDRTEEKNTWRLIFRITVLVVSV | 1 | 131 |
| | | 6454-8310\|Organism: | ITLGLTAASLVYSMNAAQPADFDGIIPAVQQVGT | | |
| | | Avian paramyxovirus | SLTNSIGGMQDVLDRTYKQVALESPLTLLNMEST | | |
| | | UPO216\|Strain Name: | IMNAITSLSYKINNGGNSSGCGAPIHDPEYIGGI | | |
| | | APMV-15/WB/Kr/UPO216/ | GKELLIDDNVDVTSFYPSAFKEHLNFIPAPTTGA | | |
| | | 2014/Protein Name: | GCTRIPSFDLSATHYCYTHNVILSGCQDHSHSHQ | | |
| | | hemagglutinin- | YIALGVLKLSDTGNVFFSTLRSINLDDTANRKSC | | |
| | | neuraminidase protein\| | SISATPLGCDILCSKVTETELEDYKSEEPTPMVH | | |
| | | Gene Symbol: HN | GRLSFDGTYSEKDLDVNNLFSDWTANYPSVGGGS | | |
| | | | YIGNRVWYAVYGGLKPGSNTDQSQRDKYVIYKRY | | |
| | | | NNTCPDPEDYQINKAKSSYTPSYFGSKRVQQAIL | | |
| | | | SIAVSPTLGSDPVLTPLSNDVVLMGAEGRVMHIG | | |
| | | | GYTYLYQRGTSYYSPALLYPLNIQDKSATASSPY | | |
| | | | KFDAFTRPGSVPCQADARCPQSCVTGVYTDPYPL | | |
| | | | IFAKDHSIRGVYGMMLNDVTARLNPIAAVFSNIS | | |
| | | | RSQITRVSSSSTKAAYTTSTCFKVIKTNRIYCMS | | |
| | | | IAEISNTLFGEFRIVPLLVEILSNGGNTARSAGG | | |
| | | | TPVKESPKGWSDAIAEPLFCTPTNVTRYNADIRR | | |
| | | | YAYSWP | | |
| NC_025360 | 8127-10158 | gb: NC_025360: | MPPAPSPVHDPSSFYGSSLFNEDTASRKGTSEEI | 1 | 132 |
| | | 8127-10158\|Organism: | HLLGIRWNTVLIVLGLILAIIGIGIGASSFSASG | | |
| | | Atlantic salmon | ITGNTTKEIRLIVEEMSYGLVRISDSVRQEISPK | | |
| | | paramyxovirus\|Strain | VTLLQNAVLSSIPALVTTETNTIINAVKNHCNSP | | |
| | | Name: ASPV/Yrkje371/ | PTPPPPTEAPLKKHETGMAPLDPTTYWTCTSGTP | | |
| | | p5\|Protein Name: | RFYSSPNATFIPGPSPLPHTATPGGCVRIPSMHI | | |
| | | hemagglutinin- | GSEIYAYTSNLIASGCQDIGKSYQNVQIGVLDRT | | |
| | | neuraminidase protein\| | PEGNPEMSPMLSHTFPINDNRKSCSIVTLKRAAY | | |
| | | Gene Symbol: HN | IYCSQPKVTEFVDYQTPGIEPMSLDHINANGTTK | | |
| | | | TWIYSPTEVVTDVPYASMYPSVGSGVVIDGKLVF | | |
| | | | LVYGGLLNGIQVPAMCLSPECPGIDQAACNASQY | | |
| | | | NQYLSGRQVVNGIATVDLMNGQKPHISVETISPS | | |
| | | | KNWFGAEGRLVYMGGRLYIYIRSTGWHSPIQIGV | | |
| | | | IYTMNPLAITWVTNTVLSRPGSAGCDWNNRCPKA | | |
| | | | CLSGVYTDAYPISPDYNHLATMILHSTSTRSNPV | | |
| | | | MVYSSPTNMVNYAQLTTTAQIAGYTTTSCFTDNE | | |
| | | | VGYCATALELTPGTLSSVQPILVMTKIPKECV | | |

### Other Proteins

[0303] In some embodiments, the fusogen may include a pH dependent protein, a homologue thereof, a fragment thereof, and a protein fusion comprising one or more proteins or fragments thereof. Fusogens may mediate membrane fusion at the cell surface or in an endosome or in another cell-membrane bound space.

[0304] In some embodiments, the fusogen includes a EFF-1, AFF-1, gap junction protein, e.g., a connexin (such as Cn43, GAP43, CX43) (DO: 10.1021/jacs.Wb5191), other tumor connection proteins, a homologue thereof, a fragment thereof, a variant thereof, and a protein fusion comprising one or more proteins or fragments thereof.

### Lipid Fusogens

[0305] In some embodiments, the retroviral vector or VLP can comprise one or more fusogenic lipids, such as saturated fatty acids. In some embodiments, the saturated fatty acids have between 10-14 carbons. In some embodiments, the saturated fatty acids have longer-chain carboxylic acids. In some embodiments, the saturated fatty acids are mono-esters.

[0306] In some embodiments, the retroviral vector or VLP can comprise one or more unsaturated fatty acids. In some embodiments, the unsaturated fatty acids have between C16 and C18 unsaturated fatty acids. In some embodiments, the unsaturated fatty acids include oleic acid, glycerol mono-oleate, glycerides, diacylglycerol, modified unsaturated fatty acids, and any combination thereof.

[0307] Without wishing to be bound by theory, in some embodiments negative curvature lipids promote membrane fusion. In some embodiments, the retroviral vector or VLP comprises one or more negative curvature lipids, e.g., exogenous negative curvature lipids, in the membrane. In embodiments, the negative curvature lipid or a precursor thereof is added to media comprising source cells, retroviral vector, or VLP. In embodiments, the source cell is engineered to express or overexpress one or more lipid synthesis genes. The negative curvature lipid can be, e.g., diacylglycerol (DAG), cholesterol, phosphatidic acid (PA), phosphatidylethanolamine (PE), or fatty acid (FA).

[0308] Without wishing to be bound by theory, in some embodiments positive curvature lipids inhibit membrane fusion. In some embodiments, the retroviral vector or VLP comprises reduced levels of one or more positive curvature lipids, e.g., exogenous positive curvature lipids, in the membrane. In embodiments, the levels are reduced by inhibiting synthesis of the lipid, e.g., by knockout or knockdown of a lipid synthesis gene, in the source cell. The positive curvature lipid can be, e.g., lysophosphatidylcholine (LPC), phosphatidylinositol (PtdIns), lysophosphatidic acid (LPA), lysophosphatidylethanolamine (LPE), or monoacylglycerol (MAG).

### Chemical Fusogens

[0309] In some embodiments, the retroviral vector or VLP may be treated with fusogenic chemicals. In some embodiments, the fusogenic chemical is polyethylene glycol (PEG) or derivatives thereof.

[0310] In some embodiments, the chemical fusogen induces a local dehydration between the two membranes that leads to unfavorable molecular packing of the bilayer. In some embodiments, the chemical fusogen induces dehydration of an area near the lipid bilayer, causing displacement of aqueous molecules between two membranes and allowing interaction between the two membranes together.

[0311] In some embodiments, the chemical fusogen is a positive cation. Some nonlimiting examples of positive cations include Ca2+, Mg2+, Mn2+, Zn2+, La3+, Sr3+, and H+.

[0312] In some embodiments, the chemical fusogen binds to the target membrane by modifying surface polarity, which alters the hydration-dependent intermembrane repulsion.

[0313] In some embodiments, the chemical fusogen is a soluble lipid soluble. Some nonlimiting examples include oleoylglycerol, dioleoylglycerol, trioleoylglycerol, and variants and derivatives thereof.

[0314] In some embodiments, the chemical fusogen is a water-soluble chemical. Some nonlimiting examples include polyethylene glycol, dimethyl sulphoxide, and variants and derivatives thereof.

[0315] In some embodiments, the chemical fusogen is a small organic molecule. A nonlimiting example includes n-hexyl bromide.

[0316] In some embodiments, the chemical fusogen does not alter the constitution, cell viability, or the ion transport properties of the fusogen or target membrane.

[0317] In some embodiments, the chemical fusogen is a hormone or a vitamin. Some nonlimiting examples include abscisic acid, retinol (vitamin A1), a tocopherol (vitamin E), and variants and derivatives thereof.

[0318] In some embodiments, the retroviral vector or VLP comprises actin and an agent that stabilizes polymerized actin. Without wishing to be bound by theory, stabilized actin in a retroviral vector or VLP can promote fusion with a target cell. In embodiments, the agent that stabilizes polymerized actin is chosen from actin, myosin, biotin-streptavidin, ATP, neuronal Wiskott-Aldrich syndrome protein (N-WASP), or formin. See, e.g., Langmuir. 2011 Aug. 16; 27(16):10061-71 and Wen et al., Nat Commun. 2016 Aug. 31; 7. In embodiments, the retroviral vector or VLP comprises exogenous actin, e.g., wild-type actin or actin comprising a mutation that promotes polymerization. In embodiments, the retroviral vector or VLP comprises ATP or phosphocreatine, e.g., exogenous ATP or phosphocreatine.

### Small Molecule Fusogens

[0319] In some embodiments, the retroviral vector or VLP may be treated with fusogenic small molecules. Some nonlimiting examples include halothane, nonsteroidal anti-inflammatory drugs (NSAIDs) such as meloxicam, piroxicam, tenoxicam, and chlorpromazine.

[0320] In some embodiments, the small molecule fusogen may be present in micelle-like aggregates or free of aggregates.

### Modifications to Protein Fusogens

[0321] Protein fusogens or viral envelope proteins may be re-targeted by mutating amino acid residues in a fusion protein or a targeting protein (e.g. the hemagglutinin protein). In some embodiments the fusogen is randomly mutated. In some embodiments the fusogen is rationally mutated. In some embodiments the fusogen is subjected to directed evolution. In some embodiments the fusogen is truncated and only a subset of the peptide is used in the retroviral vector or VLP. For example, amino acid residues in the measles hemagglutinin protein may be mutated to alter the binding properties of the protein, redirecting fusion (doi:10.1038/nbt942, Molecular Therapy vol. 16 no. 8, 1427-1436 August 2008, doi:10.1038/nbt1060, DOI: 10.1128/JVI.76.7.3558-3563.2002, DOI: 10.1128/JVI.75.17.8016-8020.2001, doi: 10.1073pnas.0604993103).

[0322] Protein fusogens may be re-targeted by covalently conjugating a targeting-moiety to the fusion protein or targeting protein (e.g. the hemagglutinin protein). In some embodiments, the fusogen and targeting moiety are covalently conjugated by expression of a chimeric protein comprising the fusogen linked to the targeting moiety. A target includes any peptide (e.g. a receptor) that is displayed on a target cell. In some examples the target is expressed at higher levels on a target cell than non-target cells. For example, single-chain variable fragment (scFv) can be conjugated to fusogens to redirect fusion activity towards cells that display the scFv binding target (doi:10.1038/nbt1060, DOI 10.1182/blood-2012-11-468579, doi:10.1038/nmeth.1514, doi:10.1006/mthe.2002.0550, HUMAN GENE THERAPY 11:817-826, doi:10.1038/nbt942, doi:10.1371/journal.pone.0026381, DOI 10.1186/s12896-015-0142-z). For example, designed ankyrin repeat proteins (DARPin) can be conjugated to fusogens to redirect fusion activity towards cells that display the DARPin binding target (doi:10.1038/mt.2013.16, doi:10.1038/mt.2010.298, doi: 10.4049/jimmunol.1500956), as well as combinations of different DARPins (doi:10.1038/mto.2016.3). For example, receptor ligands and antigens can be conjugated to fusogens to redirect fusion activity towards cells that display the target receptor (DOI: 10.1089/hgtb.2012.054, DOI: 10.1128/JVI.76.7.3558-3563.2002). A targeting protein can also include, e.g., an antibody or an antigen-binding fragment thereof (e.g., Fab, Fab′, F(ab′)2, Fv fragments, scFv antibody fragments, disulfide-linked Fvs (sdFv), a Fd fragment consisting of the VH and CHi domains, linear antibodies, single domain antibodies such as sdAb (either VL or VH), nanobodies, or camelid VHH domains), an antigen-binding fibronectin type III (Fn3) scaffold such as a fibronectin polypeptide minibody, a ligand, a cytokine, a chemokine, or a T cell receptor (TCRs). Protein fusogens may be re-targeted by non-covalently conjugating a targeting moiety to the fusion protein or targeting protein (e.g. the hemagglutinin protein). For example, the fusion protein can be engineered to bind the Fc region of an antibody that targets an antigen on a target cell, redirecting the fusion activity towards cells that display the antibody's target (DOI: 10.1128/JV.75.17.8016-8020.2001, doi:10.1038/nml192). Altered and non-altered fusogens may be displayed on the same retroviral vector or VLP (doi: 10.1016/j.biomaterials.2014.01.051).

[0323] A targeting moiety may comprise, e.g., a humanized antibody molecule, intact IgA, IgG, IgE or IgM antibody; bi- or multi-specific antibody (e.g., Zybodies®, etc); antibody fragments such as Fab fragments, Fab′ fragments, F(ab′)2 fragments, Fd′ fragments, Fd fragments, and isolated CDRs or sets thereof; single chain Fvs; polypeptide-Fc fusions; single domain antibodies (e.g., shark single domain antibodies such as IgNAR or fragments thereof); cameloid antibodies; masked antibodies (e.g., Probodies®); Small Modular ImmunoPharmaceuticals (“SMIPs™”); single chain or Tandem diabodies (TandAb®); VHHs; Anticalins®; Nanobodies®; minibodies; BiTE®s; ankyrin repeat proteins or DARPINs®; Avimers®; DARTs; TCR-like antibodies, Adnectins®; Affilins®; Trans-bodies®; Affibodies®; TrimerX®; MicroProteins; Fynomers®, Centyrins®; and KALBITOR®s.

[0324] In embodiments, the re-targeted fusogen binds a cell surface marker on the target cell, e.g., a protein, glycoprotein, receptor, cell surface ligand, agonist, lipid, sugar, class I transmembrane protein, class II transmembrane protein, or class III transmembrane protein.

[0325] Retroviral vectors or VLPs may display targeting moieties that are not conjugated to protein fusogens in order to redirect the fusion activity towards a cell that is bound by the targeting moiety, or to affect homing.

[0326] The targeting moiety added to the retroviral vector or VLP may be modulated to have different binding strengths. For example, scFvs and antibodies with various binding strengths may be used to alter the fusion activity of the retroviral vector or VLP towards cells that display high or low amounts of the target antigen (doi:10.1128/JV.01415-07, doi:10.1038/cgt.2014.25, DOI: 10.1002/jgm.1151). For example DARPins with different affinities may be used to alter the fusion activity of the retroviral vector or VLP towards cells that display high or low amounts of the target antigen (doi:10.1038/mt.2010.298). Targeting moieties may also be modulated to target different regions on the target ligand, which will affect the fusion rate with cells displaying the target (doi: 10.1093/protein/gzv005).

[0327] In some embodiments protein fusogens can be altered to reduce immunoreactivity, e.g., as described herein. For instance, protein fusogens may be decorated with molecules that reduce immune interactions, such as PEG (DOI: 10.1128/JVI.78.2.912-921.2004). Thus, in some embodiments, the fusogen comprises PEG, e.g., is a PEGylated polypeptide. Amino acid residues in the fusogen that are targeted by the immune system may be altered to be unrecognized by the immune system (doi: 10.1016/j.virol.2014.01.027, doi:10.1371/journal.pone.0046667). In some embodiments the protein sequence of the fusogen is altered to resemble amino acid sequences found in humans (humanized). In some embodiments the protein sequence of the fusogen is changed to a protein sequence that binds MHC complexes less strongly. In some embodiments, the protein fusogens are derived from viruses or organisms that do not infect humans (and which humans have not been vaccinated against), increasing the likelihood that a patient's immune system is naive to the protein fusogens (e.g., there is a negligible humoral or cell-mediated adaptive immune response towards the fusogen) (doi:10.1006/mthe.2002.0550, doi:10.1371/journal.ppat.1005641, doi:10.1038/gt.2011.209, DOI 10.1182/blood-2014-02-558163). In some embodiments, glycosylation of the fusogen may be changed to alter immune interactions or reduce immunoreactivity. Without wishing to be bound by theory, in some embodiments, a protein fusogen derived from a virus or organism that do not infect humans does not have a natural fusion targets in patients, and thus has high specificity.

### Positive Target Cell-Specific Regulatory Element

[0328] In some embodiments, a retroviral nucleic acid described herein comprises a positive target cell-specific regulatory element such as a tissue-specific promoter, a tissue-specific enhancer, a tissue-specific splice site, a tissue-specific site extending half-life of an RNA or protein, a tissue-specific mRNA nuclear export promoting site, a tissue-specific translational enhancing site, or a tissue-specific post-translational modification site.

[0329] A retroviral nucleic acid described herein can comprise regions, e.g., non-translated regions such as origins of replication, selection cassettes, promoters, enhancers, translation initiation signals (Shine Dalgarno sequence or Kozak sequence), introns, a polyadenylation sequence, 5′ and 3′ untranslated regions—which interact with host cellular proteins to carry out transcription and translation, and which are capable of directing, increasing, regulating, or controlling the transcription or expression of an operatively linked polynucleotide. Such elements may vary in their strength and specificity. Depending on the vector system and host utilized, any number of suitable transcription and translation elements, including ubiquitous promoters and inducible promoters may be used.

[0330] In particular embodiments, control elements are capable of directing, increasing, regulating, or controlling the transcription or expression of an operatively linked polynucleotide in a cell-specific manner. In particular embodiments, retroviral nucleic acids comprise one or more expression control sequences that are specific to particular cells, cell types, or cell lineages e.g., target cells; that is, expression of polynucleotides operatively linked to an expression control sequence specific to particular cells, cell types, or cell lineages is expressed in target cells and not (or at a lower level) in non-target cells.

[0331] In particular embodiments, a retroviral nucleic acid can include exogenous, endogenous, or heterologous control sequences such as promoters and/or enhancers.

[0332] In embodiments, the promoter comprises a recognition site to which an RNA polymerase binds. An RNA polymerase initiates and transcribes polynucleotides operably linked to the promoter. In particular embodiments, promoters operative in mammalian cells comprise an AT-rich region located approximately 25 to 30 bases upstream from the site where transcription is initiated and/or another sequence found 70 to 80 bases upstream from the start of transcription, a CNCAAT region where N may be any nucleotide.

[0333] In embodiments, an enhancer comprises a segment of DNA which contains sequences capable of providing enhanced transcription and in some instances can function independent of orientation relative to another control sequence. An enhancer can function cooperatively or additively with promoters and/or other enhancer elements. In some embodiments, a promoter/enhancer segment of DNA contains sequences capable of providing both promoter and enhancer functions.

[0334] Illustrative ubiquitous expression control sequences include, but are not limited to, a cytomegalovirus (CMV) immediate early promoter, a viral simian virus 40 (SV40) (e.g., early or late), a Moloney murine leukemia virus (MoMLV) LTR promoter, a Rous sarcoma virus (RSV) LTR, a herpes simplex virus (HSV) (thymidine kinase) promoter, H5, P7.5, and P11 promoters from vaccinia virus, an elongation factor 1-alpha (EF1a) promoter, early growth response 1 (EGR1), ferritin H (FerH), ferritin L (FerL), Glyceraldehyde 3-phosphate dehydrogenase (GAPDH), eukaryotic translation initiation factor 4A1 (EIF4A1), heat shock 70 kDa protein 5 (HSPA5), heat shock protein 90 kDa beta, member 1 (HSP90B1), heat shock protein 70 kDa (HSP70), β-kinesin (β-KIN), the human ROSA 26 locus Orions et al., Nature Biotechnology 25, 1477-1482 (2007)), a Ubiquitin C promoter (UBC), a phosphoglycerate kinase-1 (PGK) promoter, a cytomegalovirus enhancer/chicken β-actin (CAG) promoter, β-actin promoter and a myeloproliferative sarcoma virus enhancer, negative control region deleted, d1587rev primer-binding site substituted (MND) promoter (Challita et al., J Virol. 69(2):748-55 (1995)).

[0335] In some embodiments, the promoter is a tissue-specific promoter, e.g., a promoter that drives expression in liver cells, e.g., hepatocytes, liver sinusoidal endothelial cells, cholangiocytes, stellate cells, liver-resident antigen-presenting cells (e.g., Kupffer Cells), liver-resident immune lymphocytes (e.g., T cell, B cell, or NK cell), or portal fibroblasts. Various suitable liver-specific promoters (e.g., hepatocyte-specific promoters and liver sinusoidal endothelial cell promoters) are described in Table 6 below. Table 6 also lists several ubiquitous promoters which are not specific to liver cells. In some embodiments, a fusosome (e.g., viral vector) described herein comprises, in its nucleic acid, a promoter having a sequence of Table 6, or transcriptionally active fragment thereof, or a variant having at least 70%, 75%, 80%, 85%, 90%, 95%, 96%, 97%, 98%, or 99% identity thereto. In some embodiments, a fusosome (e.g., viral vector) described herein comprises, in its nucleic acid, a promoter having transcription factor binding sites from the region within 3 kb of the transcriptional start site for the genes listed in Table 6. In some embodiments, the a fusosome (e.g., viral vector) described herein comprises, in its nucleic acid, a region within 2.5 kb, 2 kb, 1.5 kb, 1 kb, or 0.5 kb immediately upstream of the transcriptional start site of agene listed in Table 6,or a transcriptionally active fragment thereof, or a variant having at least 70%, 75%, 80%, 85%, 90%, 95%, 96%, 97%, 98%, or 99% identity thereto.

[0336] In some embodiments, a fusosome (e.g., viral vector) described herein comprises, in its nucleic acid, a promoter having a sequence set forth in any one of SEQ ID NOS:133-142 or 161-168, or transcriptionally active fragment thereof, or a variant having at least 70%, 75%, 80%, 85%, 90%, 95%, 96%, 97%, 98%, or 99% identity thereto.

TABLE 6
Exemplary promoters, e.g., hepatocyte-specific promoters

| | | Source of | | |
|---|---|---|---|---|
| | | cis- | | |
| | Promoter | regulatory | | SEQ ID |
| Specificity | Name | elements | Exemplary sequence | NO |
| Hepatocytes | hAAT | α1 | AGATCTTGCTACCAGTGGAACAGCCACTAAGG | 161 |
| | (Serpin | antitrypsin | ATTCTGCAGTGAGAGCAGAGGGCCAGCTAAGT | |
| | A1) | gene | GGTACTCTCCCAGAGACTGTCTGACTCACGCCA | |
| | | (Serpina1 | CCCCCTCCACCTTGGACACAGGACGCTGTGGTT | |
| | | gene) | TCTGAGCCAGGTACAATGACTCCTTTCGGTAAG | |
| | | | TGCAGTGGAAGCTGTACACTGCCCAGGCAAAG | |
| | | | CGTCCGGGCAGCGTAGGCGGGCGACTCAGATC | |
| | | | CCAGCCAGTGGACTTAGCCCCTGTTTGCTCCTC | |
| | | | CGATAACTGGGGTGACCTTGGTTAATATTCACC | |
| | | | AGCAGCCTCCCCCGTTGCCCCTCTGGATCCACT | |
| | | | GCTTAAATACGGACGAGGACAGGGCCCTGTCT | |
| | | | CCTCAGCTTCAGGCACCACCACTGACCTGGGA | |
| | | | CAGTGAATGTCCCCCTGATCTGCGGCCGTGACT | |
| | | | CTCTTAAGGTAGCCTTGCAGAAGTTGGTCGTGA | |
| | | | GGCACTGGGCAGGTAAGTATCAAGGTTACAAG | |
| | | | ACAGGTTTAAGGAGACCAATAGAAACTGGGCT | |
| | | | TGTCGAGACAGAGAAGACTCTTGCGTTTCTGAT | |
| | | | AGGCACCTATTGGTCTTACTGACATCCACTTTG | |
| | | | CCTTTCTCTCCACAGGTGTCCACTCCCAGTTCA | |
| | | | ATTACAGCT | |
| Hepatocytes | ApoE. | Apolipo- | gttaggctcagaggcacacaggagtttctgggctcaccctgcccccttccaac | 133 |
| | HCR- | protein | ccctcagttcccatcctccagcagctgtttgtgtgctgcctctgaagtccacact | |
| | hAAT | E/C-I | gaacaaacttcagcctactcatgtccctaaaatgggcaaacattgcaagcagc | |
| | | gene, α1 | aaacagcaaacacacagccctccctgcctgctgaccttggagctggggcag | |
| | | antitrypsin | aggtcagagacctctctgggcccatgccacctccaacatccactcgacccctt | |
| | | gene | ggaatttcggtggagaggagcagaggttgtcctggcgtggtttaggtagtgtg | |
| | | | agaggggtacccggggatcttgctaccagtggaacagccactaaggattctg | |
| | | | cagtgagagcagagggccagctaagtggtactctcccagagactgtctgact | |
| | | | cacgccaccccctccaccttggacacaggacgctgtggtttctgagccaggt | |
| | | | acaatgactcctttcggtaagtgcagtggaagctgtacactgcccaggcaaa | |
| | | | gcgtccgggcagcgtaggcgggcgactcagatcccagccagtggacttag | |
| | | | cccctgtttgctcctccgataactggggtgaccttggttaatattcaccagcagc | |
| | | | ctcccccgttgcccctctggatccactgcttaaatacggacgaggacagggc | |
| | | | cctgtctcctcagcttcaggcaccaccactgacctgggacagtgaatgatccc | |
| | | | cctgatctgcggcctcgacggtatcgataagcttgatatcgaattctagtcgtc | |
| | | | gaccactttcacaatctgctagcaacctgaggaggttatcgtacgaaattcgct | |
| | | | gtctgcgagggccagctgttggggtgagtactccctctcaaaagcgggcatg | |
| | | | acttctgcgctaagattgtcagtttccaaaaacgaggaggatttgatattcacct | |
| | | | ggcccgcggtgatgcctttgagggtggccgcgtccatctggtcagaaaaga | |
| | | | caatctttttgttgtcaagcttgaggtgtggcaggcttgagatcgatctgaccat | |
| | | | acacttgagtgacaatgacatccactttgcctttctctccacaggtgtccactcc | |
| | | | caggtccaac | |
| Hepatocytes | Enhanced | Transthyretin | CTCGAGGTCAATTCACGCGAGTTAATAATTACC | 162 |
| | trans- | gene | AGCGCGGGCCAAATAAATAATCCGCGAGGGGC | |
| | thyretin | | AGGTGACGTTTGCCCAGCGCGCGCTGGTAATT | |
| | | | ATTAACCTCGCGAATATTGATTCGAGGCCGCG | |
| | | | ATTGCCGCAATCGCGAGGGGCAGGTGACCTTT | |
| | | | GCCCAGCGCGCGTTCGCCCCGCCCCGGACGGT | |
| | | | ATCGATAAGCTTAGGAGCTTGGGCTGCAGGTC | |
| | | | GAGGGCACTGGGAGGATGTTGAGTAAGATGGA | |
| | | | AAACTACTGATGACCCTTGCAGAGACAGAGTA | |
| | | | TTAGGACATGTTTGAACAGGGGCCGGGCGATC | |
| | | | AGCAGGTAGCTCTAGAGGATCCCCGTCTGTCTG | |
| | | | CACATTTCGTAGAGCGAGTGTTCCGATACTCTA | |
| | | | ATCTCCCTAGGCAAGGTTCATATTTGTGTAGGT | |
| | | | TACTTATTCTCCTTTTGTTGACTAAGTCAATAAT | |
| | | | CAGAATCAGCAGGTTTGGAGTCAGCTTGGCAG | |
| | | | GGATCAGCAGCCTGGGTTGGAAGGAGGGGGTA | |
| | | | TAAAAGCCCCTTCACCAGGAGAAGCCGTCACA | |
| | | | CAGATCCACAAGCTCCTGCCACCATGG | |
| Hepatocyte | TTR | transthyretin | CCCACCTCCCGGAGTCCTCTCCTGCACATTCTC | 163 |
| | | | ATGTTCCTGAAAGGCTTTTCTGTCCCTTCCACT | |
| | | | ACTCCCTGTAAGCTCCTGTGCTTCACAATTTCT | |
| | | | TGTTGAATTTTTTCTAATCTGACTCTATCAGTTA | |
| | | | TGGGAATGTTCCCTCAATTCTTAGTGCTCCAAA | |
| | | | CCGGACTTGCTCTTGGCTTGTATTTGTCCAAAA | |
| | | | TATTTGTCTTCTCTATGTTTTCTACATGTTTGTC | |
| | | | TTATAAGGACAAAAACCTGCCTTAGTTTATCCA | |
| | | | TGAACAAAGCCACGCATGCTAGTGGACACACA | |
| | | | CACACATGCGCGTGCGCGCGCACACACACACA | |
| | | | CACACACATACACACAGAGACTTTGTATGTGA | |
| | | | GTAATGAATCATCAAATCATCATAATTTCTGGA | |
| | | | CTTGTATTAATAAGTCGGCCAGGAGGAAAAGA | |
| | | | ATCTGCTGTCAATCATGGCTTCTGGTTCTCACA | |
| | | | GTCATCTCTACTTTCTTCCAGCAAGTTTGGTTCT | |
| | | | GTCAAAAACCAGCTGTCAGCCTTGTTCCTGCAT | |
| | | | GCCCAATGCAGAAGAGTCAGTAAAGAAGATTT | |
| | | | GGTTCTCTGTATTTCAGGGGCATCAATGCCAGG | |
| | | | TTGAAATATGCCATTCTGGCCCAGCTCAGTGGC | |
| | | | TCACACGTGTAATCCCAGCACTTTGGAAGGCC | |
| | | | AAAGCGGGTGGATTGCTTGAGCTCAGGAGTTC | |
| | | | GAGACCAGCCTGGGCAAGAGGCTGAGGTGGGA | |
| | | | GGATGACCTGAGCCCGGGAGGTCAAGGCTGCA | |
| | | | GCGAGCTGTGATCGTGCCACTGCACTCGAGCC | |
| | | | AGGGCGTTGGAGTGAGACCCTGTCAAAAAAAA | |
| | | | AAAAAAAAAGGAAGGAAAAAAGGAAGGAAGG | |
| | | | AAGGGAGGGAGGGAAGATGCCATTCTTAGATT | |
| | | | GAAGTGGACTTTATCTGGGCAGAACACACACA | |
| | | | CACATACACACATGCACACACACATTGTGGAG | |
| | | | AAATTGCTGACTAAGCAAAGCTTCCAAATGAC | |
| | | | TTAGTTTGGCTAAAATGTAGGCTTTTAAAAATG | |
| | | | TGAGCACTGCCAAGGGTTTTTCCTTGTTGACCC | |
| | | | ATGGATCCATCAAGTGCAAACATTTTCTAATGC | |
| | | | ACTATATTTAAGCCTGTGCAGCTAGATGTCATT | |
| | | | CAACATGAAATACATTATTACAACTTGCATCTG | |
| | | | TCTAAAATCTTGCATCTAAAATGAGAGACAAA | |
| | | | AAATCTATAAAAATGGAAAACATGCATAGAAA | |
| | | | TATGTGAGGGAGGAAAAAATTACCCCCAAGAA | |
| | | | TGTTAGTGCACGCAGTCACACAGGGAGAAGAC | |
| | | | TATTTTTGTTTTGTTTTGATTGTTTTGTTTTGTTT | |
| | | | TGGTTGTTTTGTTTTGGTGACCTAACTGGTCAA | |
| | | | ATGACCTATTAAGAATATTTCATAGAACGAAT | |
| | | | GTTCCGATGCTCTAATCTCTCTAGACAAGGTTC | |
| | | | ATATTTGTATGGGTTACTTATTCTCTCTTTGTTG | |
| | | | ACTAAGTCAATAATCAGAATCAGCAGGTTTGC | |
| | | | AGTCAGATTGGCAGGGATAAGCAGCCTAGCTC | |
| | | | AGG | |
| Hepatocytes | Alb | Albumin | ccaccgcggtggcggccgctctagcttccttagcatgacgttccacttttttcta | 134 |
| | | gene | aggtggagcttacttctttgatttgatcttttgtgaaacttttggaaattacccatct | |
| | | | tcctaagcttctgcttctctcagttttctgcttgctcattccacttttccagctgacc | |
| | | | ctgccccctaccaacattgctccacaagcacaaattcatccagagaaaataaa | |
| | | | ttctaagttttatagttgtttggatcgcataggtagctaaagaggtggcaaccca | |
| | | | cacatccttaggcatgagcttgattttttttgatttagaaccttcccctctctgttcc | |
| | | | tagactacactacacattctgcaagcatagcacagagcaatgttctactttaatt | |
| | | | actttcattttcttgtatcctcacagcctagaaaataacctgcgttacagcatcca | |
| | | | ctcagtatcccttgagcatgaggtgacactacttaacatagggacgagatggt | |
| | | | actttgtgtctcctgctctgtcagcagggcactgtacttgctgataccagggaat | |
| | | | gtttgttcttaaataccatcattccggacgtgtttgccttggccagttttccatgta | |
| | | | catgcagaaagaagtaggactgatcaatacagtcctctgcattaaagcaata | |
| | | | ggaaaaggccaacttgtctacgtttagtatgtggctgtagaaagggtatagata | |
| | | | taaaaattaaaactaatgaaatggcagtcttacacatttttggcagcttatttaaa | |
| | | | gtcttggtgttaagtacgctggagctgtcacagctaccaatcaggcatgtctgg | |
| | | | gaatgagtacacggggaccataagttactgacattcgtttcccattccatttgaata | |
| | | | cacacttttgtcatggtattgcttgctgaaattgttttgcaaaaaaaaccccttcaa | |
| | | | attcatatatattattttaataaatgaattttaatttatctcaatgttataaaaaagt | |
| | | | caattttaataattaggtacttatatacccaataatatctaacaatcatttttaaaca | |
| | | | tttgtttattgagcttattatggatgaatctatctctatatactctatatactctaaa | |
| | | | aaagaagaaagaccatagacaatcatctatttgatatgtgtaaagtttacatgtga | |
| | | | gtagacatcagatgctccatttctcactgtaataccatttatagttacttgcaaaa | |
| | | | ctaactggaattctaggacttaaatattttaagttttagctgggtgactggttgga | |
| | | | aaattttaggtaagtactgaaaccaagagattataaaacaataaattctaaagttt | |
| | | | tagaagtgatcataatcaaatattaccctctaatgaaaatattccaaagttgagct | |
| | | | acagaaatttcaacataagataattttagctgtaacaatgtaatttgttgtctatttt | |
| | | | cttttgagatacagttttttctgtctagctttggctgtcctggaccttgctctgtaga | |
| | | | ccaggttggtcttgaactcagagatctgcttgcctctgccttgcaagtgctagg | |
| | | | attaaaagcatgtgccaccactgcctggctacaatctatgttttataagagattat | |
| | | | aaagctctggctttgtgacattaatctttcagataataagtcttttggattgtgtctg | |
| | | | gagaacatacagactgtgagcagatgttcagaggtatatttgcttaggggtga | |
| | | | attcaatctgcagcaataattatgagcagaattactgacacttccattttatacatt | |
| | | | ctacttgctgatctatgaaacatagataagcatgcaggcattcatcatagttttct | |
| | | | ttatctggaaaaacattaaatatgaaagaagcactttattaatacagtttagatgt | |
| | | | gttttgccatcttttaatttcttaagaaatactaagctgatgcagagtgaagagtg | |
| | | | tgtgaaaagcagtggtgcagcttggcttgaactcgttctccagcttgggatcga | |
| | | | cctgcaggcatgcttccatgccaaggcccacactgaaatgctcaaatgggag | |
| | | | acaaagagattaagctcttatgtaaaatttgctgttttacataactttaatgaatgg | |
| | | | acaaagtcttgtgcatgggggtgggggtggggttagaggggaacagctcca | |
| | | | gatggcaaacatacgcaagggatttagtcaaacaactttttggcaaagatggt | |
| | | | atgattttgtaatggggtaggaaccaatgaaatgcgaggtaagtatggttaatg | |
| | | | atctacagttattggttaaagaagtatattagagcgagtctttctgcacacagat | |
| | | | cacctttcctatcaaccccgggatcccccgggctgcaggaattcgatatcaag | |
| | | | cttatcgataccgtcgacctcgagggggggcccggtac | |
| Hepatocytes | Apoa2 | Apolipo- | CCGGGCGTGGTGGCGCATGTCTGTAATCCCAG | 164 |
| | | protein | CTACTTGGGATGCTGAGGCAGGAGAATCCTTG | |
| | | A-II | AACCCGGGAGGTGGAGGTTGCAGTGAGCCGAG | |
| | | gene | ATCATGCCATTACGCTCCAGCCTGAGCAACAA | |
| | | | GAGCAAAACTCCGTCTCAGGAAAACAAACAAA | |
| | | | AAAACCTGCACATATACTTCTGAATTTAAAACA | |
| | | | AAAGTTAAAAAACAAAGATTTCTTGGTCTCTG | |
| | | | GTCACTACCTCCCTCATCAGCTTTGCGCCTCCA | |
| | | | CTGTCACCCTCAGGAATGTTCCACATACTCAGC | |
| | | | GAGTATGCTTGGGGGGCAAAAGGGTGAAAGAT | |
| | | | ACAAAAGCTTCTGATATCTATTTAACTGATTTC | |
| | | | ACCCAAATGCTTTGAACCTGGGAATGTACCTCT | |
| | | | CCCCCTCCCCCACCCCCAACAGGAGTGAGACA | |
| | | | AGGGCCAGGGCTATTGCCCCTGCTGACTCAAT | |
| | | | ATTGGCTAATCACTGCCTAGAACTGATAAGGT | |
| | | | GATCAAATGACCAGGTGCCTTCAACCTTTACCC | |
| | | | TGGTAGAAGCCTCTTATTCACCTCTTTTCCTGC | |
| | | | CAGAGCCCTCCATTGGGAGGGGACGGGCGGAA | |
| | | | GCTGTTTTCTGAATTTGTTTTACTGGGGGTAGG | |
| | | | GTATGTTCAGTGATCAGCATCCAGGTCATTCTG | |
| | | | GGCTCTCCTGTTTTCTCCCCGTCTCATTACACAT | |
| | | | TAACTCAAAAACGGACAAGATCATTTACACTT | |
| | | | GCCCTCTTACCCGACCCTCATTCCCCTAACCCC | |
| | | | CATAGCCCTCAACCCTGTCCCTGATTTCAATTC | |
| | | | CTTTCTCCTTTCTTCTGCTCCCCAATATCTCTCT | |
| | | | GCCAAGTTGCAGTAAAGTGGGATAAGGTTGAG | |
| | | | AGATGAGATCTACCCATAATGGAATAAAGACA | |
| | | | CCATGAGCTTTCCATGGTATGATGGGTTGATGG | |
| | | | TATTCCATGGGTTGATATGTCAGAGCTTTCCAG | |
| | | | AGAAATAACTTGGAATCCTGCTTCCTGTTGCAC | |
| | | | TCAAGTCCAAGGACCTCAGATCTCAAAAGAAT | |
| | | | GAACCTCAAATATACCTGAAGTGTACCCCCTTA | |
| | | | GCCTCCACTAAGAGCTGTACCCCCTGCCTCTCA | |
| | | | CCCCATCACCATGAGTCTTCCATGTGCTTGTCC | |
| | | | TCTCCTCCCCCATTTCTCCAACTTGTTTATCCTC | |
| | | | ACATAATCCCTGCCCCACTGGGCCCATCCATAG | |
| | | | TCCCTGTCACCTGACAGGGGGTGGGTAAACAG | |
| | | | ACAGGTATATAGCCCCTTCCTCTCCAGCCAGGG | |
| | | | CAGGCACAGACACCAAGGACAGAGACGCTGGC | |
| | | | TAGGTAAGATAAGGAGGCAAGATGTGTGAGCA | |
| | | | GCATCCAAAGAGGCCTGGGCTTCAGTTGTGGA | |
| | | | GAGGGAGAGAGCCAGGTTGGAATGGGCAGCA | |
| | | | GGTAGGGAGATCCCTGGGGAGGAGCTGAAGCC | |
| | | | CATTTGGCTTCAGTGTCCCCCAAACCCCCACCA | |
| | | | CCCT | |
| Hepatocytes | Cyp3a4 | Cyp3a4 | AGCTCCTGGGGCCTGCCCTCCTCCCATTAGAAA | 165 |
| | | gene | ATCCTCCACTTGTCAAAAAGGAAGCCATTTGCT | |
| | | | TTGAACTCCAATTCCACCCCCAAGAGGCTGGG | |
| | | | ACCATCTTATTGGAGTCCTTGATGCTGTGTGAC | |
| | | | CTGCAGTGACCACTGCCCCATCATTGCTGGCTG | |
| | | | AGGTGGTTGGGGTCCATCTGGCTATCTGGGCA | |
| | | | GCTGTTCTCTTCTCTCCTTTCTCTCCTGTTTCCA | |
| | | | GACATGCAGTATTTCCAGAGAGAAGGGGCCAC | |
| | | | TCTTTGGCAAAGAACCTGTCTAACTTGCTATCT | |
| | | | ATGGCAGGACCTTTGAAGGGTTCACAGGAAGC | |
| | | | AGCACAAATTGATACTATTCCACCAAGCCATC | |
| | | | AGCTCCATCTCATCCATGCCCTGTCTCTCCTTTA | |
| | | | GGGGTCCCCTTGCCAACAGAATCACAGAGGAC | |
| | | | CAGCCTGAAAGTGCAGAGACAGCAGCTGAGGC | |
| | | | ACAGCCAAGAGCTCTGGCTGTATTAATGACCT | |
| | | | AAGAAGTCACCAGAAAGTCAGAAGGGATGAC | |
| | | | ATGCAGAGGCCCAGCAATCTCAGCTAAGTCAA | |
| | | | CTCCACCAGCCTTTCTAGTTGCCCACTGTGTGT | |
| | | | ACAGCACCCTGGTAGGGACCAGAGCCATGACA | |
| | | | GGGAATAAGACTAGACTATGCCCTTGAGGAGC | |
| | | | TCACCTCTGTTCAGGGAAACAGGCGTGGAAAC | |
| | | | ACAATGGTGGTAAAGAGGAAAGAGGACAATA | |
| | | | GGATTGCATGAAGGGGATGGAAAGTGCCCAGG | |
| | | | GGAGGAAATGGTTACATCTGTGTGAGGAGTTT | |
| | | | GGTGAGGAAAGACTCTAAGAGAAGGCTCTGTC | |
| | | | TGTCTGGGTTTGGAAGGATGTGTAGGAGTCTTC | |
| | | | TAGGGGGCACAGGCACACTCCAGGCATAGGTA | |
| | | | AAGATCTGTAGGTGTGGCTTGTTGGGATGAATT | |
| | | | TCAAGTATTTTGGAATGAGGACAGCCATAGAG | |
| | | | ACAAGGGCAGGAGAGAGGCGATTTAATAGATT | |
| | | | TTATGCCAATGGCTCCACTTGAGTTTCTGATAA | |
| | | | GAACCCAGAACCCTTGGACTCCCCAGTAACAT | |
| | | | TGATTGAGTTGTTTATGATACCTCATAGAATAT | |
| | | | GAACTCAAAGGAGGTCAGTGAGTGGTGTGTGT | |
| | | | GTGATTCTTTGCCAACTTCCAAGGTGGAGAAGC | |
| | | | CTCTTCCAACTGCAGGCAGAGCACAGGTGGCC | |
| | | | CTGCTACTGGCTGCAGCTCCAGCCCTGCCTCCT | |
| | | | TCTCTAGCATATAAACAATCCAACAGCCTCACT | |
| | | | GAATCACTGCTGTGCAGGGCAGGAAAGCTCCA | |
| | | | TGCA | |
| Hepatocytes | LP1B | Apolipo- | cggcctctagactcgagccctaaaatgggcaaacattgcaagcagcaaaca | 135 |
| | | protein | gcaaacacacagccctccctgcctgctgaccttggagctggggcagaggtc | |
| | | E/C-I | agagacctctctgggcccatgccacctccaacatccactcgaccccttggaat | |
| | | gene, α1 | ttcggtggagaggagcagaggttgtcctggcgtggtttaggtagtgtgagag | |
| | | antitrypsin | ggtggacacaggacgctgtggtttctgagccagggggcgactcagatccca | |
| | | gene | gccagtggacttagcccctgtttgctcctccgataactggggtgaccttggtta | |
| | | | atattcaccagcagcctcccccgttgcccctctggatccactgcttaaatacgg | |
| | | | acgaggacagggccctgtctcctcagcttcaggcaccaccactgacctggg | |
| | | | acagtgaatccggactctaaggtaaatataaaatttttaagtgtataatgtgttaa | |
| | | | actactgattctaattgtttctctcttttagattccaacctttggaactgaaccggt | |
| Hepatocytes | MIR122 | microRNA- | GAATGCATGGTTAACTACGTCAGAAATGACCA | 166 |
| | | 122 | GTTCAAGAGGAGAATGAGATTGGCTTCCAAAT | |
| | | | GTTGGTCAAGAGCTCTACGTAGCATGAGCCAA | |
| | | | GGATCTATTGAACTTAGTAGGCTCCTGTGACCG | |
| | | | GTGACTCTTCTGTCTCTAGAAATCTGGGGAGGT | |
| | | | GACCAGGTCATACATGGCAGTCTTCCCGTGAG | |
| | | | GAACGTTAAACTGGTTGGAAGTTGGGGTTCTG | |
| | | | AGGGGAAGATGTATTCACTAGGTGACCTGTCTT | |
| | | | CTCTGCCTCGGTGGCCTCCATGGCTGCCTGCTG | |
| | | | GCCGCACACCCCCACTCAGCAGAGGAATGGAC | |
| | | | TTTCCAATCTTGCTGAGTGTGTTTGACCAAAGG | |
| | | | TGGTGCTGACTTAGTGGCCTAAGGTCGTGCCCT | |
| | | | CCCTCCCCCACTGAATCGATAAATAATGCGACT | |
| | | | TATCAGAAAGAGAAAGAATTGTTTACTTTTAA | |
| | | | ACCCTGGATCCCATAAAGGGAGAGGGGAGAGG | |
| | | | CCTAAAGCCACAGAAGCTGTGGAAGGCGCCAT | |
| | | | CCTGCCTGCCACAGGAAGGGCCTTGGACTGAG | |
| | | | AGGACCGGAGCTGACTGGGGGTAAGTGCGGCT | |
| | | | CTCCCCCGGCGCCTGCCGACCCCCCTGAGTGAT | |
| | | | CAGGCCGTTCTTTGGGGTGGCCGCTGACCGAG | |
| | | | AAATGACGGGAGG | |
| | | | See Li et al., 2011, J. Hepatol., 55:602-611 | |
| Hepatocytes | hemopexin | Hemopexin | GCAGCTTTGGGAGTGGGCCCAGGAAGTACTGA | 167 |
| | | gene | GGATAGCAGGTGAGATCCCAGGAAGAGATGGA | |
| | | | TGTGGGGCCGAGACACTGGAGAGAGAAACAG | |
| | | | GACTGTCAGATAAAGGGCGTCTGTGACTCCTA | |
| | | | GATCTCATTATGCCTACTACCATAACCTACCCC | |
| | | | CAATTCCTAATATTCTCCTACCCTAGAGGGGGG | |
| | | | GAAATTGTCAGAAATTTGGCTGCAACACTAGC | |
| | | | AACACTACTCAGTACTTGAAATGCATTTTTGCA | |
| | | | TTTTTTTCATTCAACAAATATTTCTGGAACAAC | |
| | | | TCTTATATGCCAGGCACTATTTTAGGAGTCAGG | |
| | | | GATATATAATGGTAAACAAGACAGGCAAAACA | |
| | | | AAGCAAAGCAACAACAACCATCACCAGATAAG | |
| | | | TAGACAGATGAAAGAATTTCAAGTTTTAGTAA | |
| | | | GTAAAATAAAACAAGCAAGGGTCTGAAATGGC | |
| | | | TAGATAAGGTGGTCAAGAAAGGCTTCATTGAG | |
| | | | AAGGTAGCATTTAAGCAGGAGTCAGCTAGAAA | |
| | | | TATTGTGAAATTCCAGTTACAGTTCTATTTGTT | |
| | | | CTGGGTTGGTTAAATAAAGCTTTTTCCCCCAAG | |
| | | | GTGGAAACTACCAAGAAAGACTAATTACTAGT | |
| | | | AGTGGTGGTGCTCTCTGGAAGAGAGACACCTC | |
| | | | CTGTTTCTGCCTCATTACTGTCAACCCTTCACTT | |
| | | | CCAGGCACTTTTTGCAAAGCCCTTTGCCAGTCA | |
| | | | GGGAAGGCGAGAGGCTGGGCATGGGGCTTGGA | |
| | | | CATTTGACAACAGTGAGACATTATTGTCCCCAG | |
| | | | ACTCACTAGCCCAAGGGTAAAGCTGAAGAGGC | |
| | | | TTGGGCATGCCCCAGAAAGGCCCCTGATGAAG | |
| | | | CTTGGAAAAAGCTGTTCTCTGAGTATTTCTAAG | |
| | | | TAAGTTTATCTGTGTGTGTGGTTACTAAAAGTA | |
| | | | GTAAGTATTGCTGTCTCTAGCTGCCTTAGAGCA | |
| | | | GGGCTTGACACAGTACACAGCAATATTAGTTC | |
| | | | CCTCCTTTTCTCACCTCCCCCATTGTGGAGATA | |
| | | | AACTCAATCACAAAAGGTGATCCTCAGTCTACT | |
| | | | CACTTCCCTGACTTATGGATGCCTGGACCCATT | |
| | | | GCCAGTGTGAGAGTCACAGCTGGACGTCAGCA | |
| | | | GTGTAGCCCAGTTACTGCTTGAAAATTGCTGAA | |
| | | | GGGGGTTGGGGGGCAGCTGCCGGGAAAAAGG | |
| | | | AGTCTTGGATTCAGATTTCTGTCCAGACCCTGA | |
| | | | CCTTATTTGCAGTGATGTAATCAGCCAATATTG | |
| | | | GCTTAGTCCTGGGAGACAGCACATTCCCAGTA | |
| | | | GAGTTGGAGGTGGGGGTGGTGCTGCTGCCAAC | |
| | | | T | |
| Hepatocytes | HLP | Apolipo- | tgtttgctgcttgcaatgtttgcccattttagggtggacacaggacgctgtggttt | 136 |
| | | protein, | ctgagccagggggcgactcagatcccagccagtggacttagcccctgtttgc | |
| | | SERINA1 | tcctccgataactggggtgaccttggttaatattcaccagcagcctcccccgtt | |
| | | | gcccctctggatccactgcttaaatacggacgaggacagggccctgtctcctc | |
| | | | agcttcaggcaccaccactgacctgggacagtgaatc | |
| liver | VEC | Vascular | CCCCTGCCCTCCTCCTCTGCCCTCTCCTGGCATT | 168 |
| sinusoidal | | endothelial | CCTCCTTCATCATGGGACCCTCTTCTAATGGAT | |
| endothelial | | cadherin | CCCCAAATGTCAGAGGGTCCAAGTCCTCCCTCC | |
| cells | | gene | CTCCAAGCTCATCCATGCCCATGGCCTCAGATG | |
| | | | CCAGCCATAAGCTGTTGGGTTCCAAACCTCGAC | |
| | | | TCCAGGCTGGACTCACCCCTGTCTCCCCCACCA | |
| | | | GCCTGACACCTCCACCTGGGTATCTAACGAGC | |
| | | | ATCTCAAACTCAACCTGCCTGAGACAGAGGAA | |
| | | | TCACTATCCCCTCCTCCTCCAAAAATATCCTTC | |
| | | | CATCACACTCCCCATCTTGTGCTCTGATTTACT | |
| | | | AAACGGCCCTGGGCCCTCTCTTTCTCAGGGTCT | |
| | | | CTGCTTGCCCAGCTATATAATAAAACAAGTTTG | |
| | | | GGACTTCCCAACCATTCACCCATGGAAAAACA | |
| | | | GAAGCAACTCTTCAAAGGACAGATTCCCAGGA | |
| | | | TCTGCCCTGGGAGATTCCAAATCAGTTGATCTG | |
| | | | GGGTGAGCCCAGTCCTCTGTAGTTTTTAGAAGC | |
| | | | TCCTCCTATGTCTCTCCTGGTCAGCAGAATCTT | |
| | | | GGCCCCTCCCTTCCCCCCAGCCTCTTGGTTCTTC | |
| | | | TGGGCTCTGATCCAGCCTCAGCGTCACTGTCTT | |
| | | | CCACGCCCCTCTTTGATTCTCGTTTATGTCAAA | |
| | | | AGCCTTGTGAGGATGAGGCTGTGATTATCCCCA | |
| | | | TTTTACAGATGAGGAAACTGTGGCTCCAGGAT | |
| | | | GACACAACTGGCCAGAGGTCACATCAGAAGCA | |
| | | | GAGCTGGGTCACTTGACTCCACCCAATATCCCT | |
| | | | AAATGCAAACATCCCCTACAGACCGAGGCTGG | |
| | | | CACCTTAGAGCTGGAGTCCATGCCCGCTCTGAC | |
| | | | CAGGAGAAGCCAACCTGGTCCTCCAGAGCCAA | |
| | | | GAGCTTCTGTCCCTTTCCCATCTCCTGAAGCCT | |
| | | | CCCTGTCACCTTTAAAGTCCATTCCCACAAAGA | |
| | | | CATCATGGGATCACCACAGAAAATCAAGCTCT | |
| | | | GGGGCTAGGCTGACCCCAGCTAGATTTTTGGCT | |
| | | | CTTTTATACCCCAGCTGGGTGGACAAGCACCTT | |
| | | | AAACCCGCTGAGCCTCAGCTTCCCGGGCTATA | |
| | | | AAATGGGGGTGATGACACCTGCCTGTAGCATT | |
| | | | CCAAGGAGGGTTAAATGTGATGCTGCAGCCAA | |
| | | | GGGTCCCCACAGCCAGGCTCTTTGCAGGTGCTG | |
| | | | GGTTCAGAGTCCCAGAGCTGAGGCCGGGAGTA | |
| | | | GGGGTTCAAGTGGGGTGCCCCAGGCAGGGTCC | |
| | | | AGTGCCAGCCCTCTGTGGAGACAGCCATCCGG | |
| | | | GGCCGAGGCAGCCGCCCACCGCAGGGCCTGCC | |
| | | | TATCTGCAGCCAGCCCAGCCCTCACAAAGGAA | |
| | | | CAATAACAGGAAACCATCCCAGGGGGAAGTGG | |
| | | | GCCAGGGCCAGCTGGAAAACCTGAAGGGGAG | |
| | | | GCAGCCAGGCCTCCCTCGCCAGCGGGGTGTGG | |
| | | | CTCCCCTCCAAAGACGGTCGGCTGACAGGCTC | |
| | | | CACAGAGCTCCACTCACGCTCAGCCCTGGACG | |
| | | | GACAGGCAGTCCAACGGAACAGAAACATCCCT | |
| | | | CAGCCCACAGGCACGGTGAGTGGGGGCTCCCA | |
| | | | CACTCCCCTCCACCCCAAACCCGCCACCCTGCG | |
| ubiquitous | EF1a | EF1α gene | gggcagagcgcacatcgcccacagtccccgagaagttggggggaggggt | 137 |
| | core | | cggcaattgaacgggtgcctagagaaggtggcgcggggtaaactgggaaa | |
| | promoter | | gtgatgtcgtgtactggctccgcctttttcccgagggtgggggagaaccgtat | |
| | | | ataagtgcagtagtcgccgtgaacgttctttttcgcaacgggtttgccgccaga | |
| | | | acacag | |
| ubiquitous | EF1a | EF1α gene | ggctccggtgcccgtcagtgggcagagcgcacatcgcccacagtccccga | 138 |
| | | | gaagttggggggaggggtcggcaattgaaccggtgcctagagaaggtggc | |
| | | | gcggggtaaactgggaaagtgatgtcgtgtactggctccgcctttttcccgag | |
| | | | ggtgggggagaaccgtatataagtgcagtagtcgccgtgaacgttctttttcg | |
| | | | caacgggtttgccgccagaacacaggtaagtgccgtgtgtggttcccgcgg | |
| | | | gcctggcctctttacgggttatggcccttgcgtgccttgaattacttccacctgg | |
| | | | ctccagtacgtgattcttgatcccgagctggagccaggggcgggccttgcgc | |
| | | | tttaggagccccttcgcctcgtgcttgagttgaggcctggcctgggcgctggg | |
| | | | gccgccgcgtgcgaatctggtggcaccttcgcgcctgtctcgctgctttcgat | |
| | | | aagtctctagccatttaaaatttttgatgacctgctgcgacgctttttttctggcaa | |
| | | | gatagtcttgtaaatgcgggccaggatctgcacactggtatttcggtttttgggc | |
| | | | ccgcggccggcgacggggcccgtgcgtcccagcgcacatgttcggcgag | |
| | | | gcggggcctgcgagcgcggccaccgagaatcggacgggggtagtctcaa | |
| | | | gctggccggcctgctctggtgcctggcctcgcgccgccgtgtatcgccccgc | |
| | | | cctgggcggcaaggctggcccggtcggcaccagttgcgtgagcggaaaga | |
| | | | tggccgcttcccggccctgctccagggggctcaaaatggaggacgcggcg | |
| | | | ctcgggagagcgggcgggtgagtcacccacacaaaggaaaagggcctttc | |
| | | | cgtcctcagccgtcgcttcatgtgactccacggagtaccgggcgccgtccag | |
| | | | gcacctcgattagttctggagcttttggagtacgtcgtctttaggttgggggga | |
| | | | ggggttttatgcgatggagtttccccacactgagtgggtggagactgaagtta | |
| | | | ggccagcttggcacttgatgtaattctccttggaatttggcctttttgagtttggat | |
| | | | cttggttcattctcaagcctcagacagtggttcaaagtttttttcttccatttcaggt | |
| | | | gtcgtga | |
| ubiquitous | hPGK | PGK gene | ggggttggggttgcgccttttccaaggcagccctgggtttgcgcagggacgc | 139 |
| | | | ggctgctctgggcgtggttccgggaaacgcagcggcgccgaccctgggtct | |
| | | | cgcacattcttcacgtccgttcgcagcgtcacccggatcttcgccgctaccctt | |
| | | | gtgggccccccggcgacgcttcctgctccgcccctaagtcgggaaggttcct | |
| | | | tgcggttcgcggcgtgccggacgtgacaaacggaagccgcacgtctcacta | |
| | | | gtaccctcgcagacggacagcgccagggagcaatggcagcgcgccgacc | |
| | | | gcgatgggctgtggccaatagcggctgctcagcggggcgcgccgagagca | |
| | | | gcggccgggaaggggcggtgcgggaggcggggtgtggggcggtagtgt | |
| | | | gggccctgttcctgcccgcgcggtgttccgcattctgcaagcctccggagcg | |
| | | | cacgtcggcagtcggctccctcgttgaccgaatcaccgacctctctcccca | |
| ubiquitous | mCMV | Cytomegalo- | ggtaggcgtgtacggtgggaggcctatataagcagagct | 140 |
| | | virus | | |
| ubiquitous | Ubc | Ubiquitin C | gtctaacaaaaaagccaaaaacggccagaatttagcggacaatttactagtct | 141 |
| | | gene | aacactgaaaattacatattgacccaaatgattacatttcaaaaggtgcctaaaa | |
| | | | aacttcacaaaacacactcgccaaccccgagcgcatagttcaaaaccggag | |
| | | | cttcagctacttaagaagataggtacataaaaccgaccaaagaaactgacgc | |
| | | | ctcacttatccctcccctcaccagaggtccggcgcctgtcgattcaggagagc | |
| | | | ctaccctaggcccgaaccctgcgtcctgcgacggagaaaagcctaccgcac | |
| | | | acctaccggcaggtggccccaccctgcattataagccaacagaacgggtga | |
| | | | cgtcacgacacgacgagggcgcgcgctcccaaaggtacgggtgcactgcc | |
| | | | caacggcaccgccataactgccgcccccgcaacagacgacaaaccgagtt | |
| | | | ctccagtcagtgacaaacttcacgtcagggtccccagatggtgccccagccc | |
| | | | atctcacccgaataagagctttcccgcattagcgaaggcctcaagaccttggg | |
| | | | ttcttgccgcccaccatgccccccaccttgtttcaacgacctcacagcccgcct | |
| | | | cacaagcgtcttccattcaagactcgggaacagccgccattttgctgcgctcc | |
| | | | ccccaacccccagttcagggcaaccttgctcgcggacccagactacagccc | |
| | | | ttggcggtctctccacacgcttccgtcccaccgagcggcccggcggccacg | |
| | | | aaagccccggccagcccagcagcccgctactcaccaagtgacgatcacag | |
| | | | cgatccacaaacaagaaccgcgacccaaatcccggctgcgacggaactag | |
| | | | ctgtgccacacccggcgcgtccttatataatcatcggcgttcaccgccccacg | |
| | | | gagatccctccgcagaatcgccgagaagggactacttttcctcgcctgttccg | |
| | | | ctctctggaaagaaaaccagtgccctagagtcacccaagtcccgtcctaaaat | |
| | | | gtccttctgctgatactggggttctaaggccgagtcttatgagcagcgggccg | |
| | | | ctgtcctgagcgtccgggcggaaggatcaggacgctcgctgcgcccttcgtc | |
| | | | tgacgtggcagcgctcgccgtgaggaggggggcgcccgcgggaggcgc | |
| | | | caaaacccggcgcggaggcc | |
| ubiquitous | SFFV | Spleen | gtaacgccattttgcaaggcatggaaaaataccaaaccaagaatagagaagt | 142 |
| | | focus- | tcagatcaagggcgggtacatgaaaatagctaacgttgggccaaacaggata | |
| | | forming | tctgcggtgagcagtttcggccccggcccggggccaagaacagatggtcac | |
| | | virus | cgcagtttcggccccggcccgaggccaagaacagatggtccccagatatgg | |
| | | | cccaaccctcagcagtttcttaagacccatcagatgtttccaggctcccccaag | |
| | | | gacctgaaatgaccctgcgccttatttgaattaaccaatcagcctgcttctcgct | |
| | | | tctgttcgcgcgcttctgcttcccgagctctataaaagagctcacaacccctca | |
| | | | ctcggcgcgccagtcctccgacagactgagtcgcccggg | |

[0337] Various consensus sequences within liver-specific cis-regulatory modules (e.g., promoters) have been described. In some embodiments, a liver-specific cis-regulatory module comprises a binding site for one or more of HNF1α, C/EBP, LEF1, FOX, IRF, LEF1/TCF, Tall p/E47, and MyoD. In some embodiments, a liver-specific cis-regulatory module comprises a sequence set out in FIG. 1 or Table 1 of Chuah et al, “Liver-Specific Transcriptional Modules Identified by Genome-Wide In Silico Analysis Enable Efficient Gene Therapy in Mice and Non-Human Primates” Mol Ther. 2014 September; 22(9): 1605-1613, which is herein incorporated by reference in its entirety, including the sequences of FIG. 1 and Table 1 therein. In some embodiment, a liver-specific cis-regulatory module comprises a human sequence of HS-CRM1, HS-CRM2, HS-CRM3, HS-CRM4, HS-CRM5, HS-CRM6, HS-CRM7, HS-CRM8, HS-CRM9, HS-CRM10, HS-CRM11, HS-CRM12, HS-CRM13, or HS-CRM14 as described in Chuah et al supra.

[0338] An internal ribosome entry site (IRES) typically promotes direct internal ribosome entry to the initiation codon, such as ATG, of a cistron (a protein encoding region), thereby leading to the cap-independent translation of the gene. See, e.g., Jackson et al, (1990) Trends Biochem Sci 15(12):477-83) and Jackson and Kaminski. (1995) RNA 1 (10):985-1000. In particular embodiments, a vector includes one or more exogenous genes encoding one or more exogenous agents. In particular embodiments, to achieve efficient translation of each of the plurality of exogenous protein agents, the polynucleotide sequences can be separated by one or more IRES sequences or polynucleotide sequences encoding self-cleaving polypeptides.

[0339] The retroviral nucleic acids herein can also comprise one or more Kozak sequences, e.g., a short nucleotide sequence that facilitates the initial binding of mRNA to the small subunit of the ribosome and increases translation. The consensus Kozak sequence is (GCC)RCCATGG, where R is a purine (A or G) (Kozak, (1986) Cell. 44(2):283-92, and Kozak, (1987) Nucleic Acids Res. 15(20): 8125-48).

[0340] Promoters Responsive to a Heterologous Transcription Factor and Inducer

[0341] In some embodiments, a retroviral nucleic acid comprises an element allowing for conditional expression of the exogenous agent, e.g., any type of conditional expression including, but not limited to, inducible expression; repressible expression; cell type-specific expression, or tissue-specific expression. In some embodiments, to achieve conditional expression of the exogenous agent, expression is controlled by subjecting a cell, tissue, or organism to a treatment or condition that causes the exogenous agent to be expressed or that causes an increase or decrease in expression of the exogenous agent.

[0342] Illustrative examples of inducible promoters/systems include, but are not limited to, steroid-inducible promoters such as promoters for genes encoding glucocorticoid or estrogen receptors (inducible by treatment with the corresponding hormone), metallothionine promoter (inducible by treatment with various heavy metals), MX-1 promoter (inducible by interferon), the “GeneSwitch” mifepristone-regulatable system (Sirin et al., 2003, Gene, 323:67), the cumate inducible gene switch (WO 2002/088346), tetracycline-dependent regulatory systems, etc.

[0343] Transgene expression may be activated or repressed by the presence or absence of an inducer molecule. In some cases the inducer molecule activates or represses gene expression in a graded manner, and in some cases the inducer molecules activates or represses gene expression in an all-or-nothing manner.

[0344] A commonly used inducible promoter/system is tetracycline (Tet)-regulated system. The Tet system is based on the coexpression of two elements in the respective target cell: (i) the tetracycline response element containing repeats of the Tet-operator sequences (TetO) fused to a minimal promoter and connected to a gene of interest (e.g., a gene encoding the exogenous agent) and (ii) the transcriptional transactivator (tTA), a fusion protein of the Tet-repressor (TetR) and the transactivation domain of the herpes simplex virus derived VP16 protein. Whereas in the originally described version, transgene expression was active in the absence of tetracycline or its potent analogue doxycycline (Do), referred to as Tet-OFF system, modification of four amino acids within the transactivator protein resulted in a reverse tTA (rtTA), which only binds to TetO in the presence of Dox (Tet-ON system). In some embodiments, in the transactivator, the VP16 domain has been replaced by minimal activation domains, potential splice-donor and splice acceptor sites have been removed, and the protein has been codon optimization, resulting in the improved Transactivator variant rtTA2S-M2 with higher sensitivity to Dox and lower baseline activity. Furthermore, different Tet-responsive promoter elements have been generated, including modification in the TetO with 36-nucleotide spacing from neighboring operators to enhance regulation. Additional modifications may be useful to further reduce basal activity and increase the expression dynamic range. As an example, the pTet-T11 (short: TII) variant displays a high dynamic range and low background activity.

[0345] Conditional expression can also be achieved by using a site specific DNA recombinase. According to certain embodiments, the retroviral nucleic acid comprises at least one (typically two) site(s) for recombination mediated by a site specific recombinase, e.g., an excisive or integrative protein, enzyme, cofactor or associated protein that is involved in recombination reactions involving one or more recombination sites (e.g., two, three, four, five, seven, ten, twelve, fifteen, twenty, thirty, fifty, etc.), which may be wild-type proteins (see Landy, Current Opinion in Biotechnology 3:699-707 (1993)), or mutants, derivatives (e.g., fusion proteins containing the recombination protein sequences or fragments thereof), fragments, and variants thereof. Illustrative examples of recombinases include, but are not limited to: Cre, Int, IHF, Xis, Flp, Fis, Hin, Gin, <DC31, Cin, Tn3 resolvase, TndX, XerC, XerD, TnpX, Hjc, Gin, SpCCE1, and ParA.

[0346] Riboswitches to Regulate Exogenous Agent Expression

[0347] Some of the compositions and methods provided herein include one or more riboswitches or polynucleotides that include one or more riboswitch. Riboswitches are a common feature in bacteria to regulate gene expression and are a means to achieve RNA control of biological functions. Riboswitches can be present in the 5′-untranslated region of mRNAs and can allow for regulatory control over gene expression through binding of a small molecule ligand that induces or suppresses a riboswitch activity. In some embodiments, the riboswitch controls a gene product involved in the generation of the small molecule ligand. Riboswitches typically act in a cis-fashion, although riboswitches have been identified that act in a trans-fashion. Natural riboswitches consist of two domains: an aptamer domain that binds the ligand through a three-dimensional folded RNA structure and a function switching domain that induces or suppresses an activity in the riboswitch based on the absence or presence of the ligand. Thus, there are two ligand sensitive conformations achieved by the riboswitch, representing on and off states (Garst et al., 2011). The function switching domain can affect the expression of a polynucleotide by regulating: an internal ribosome entry site, pre-mRNA splice donor accessibility in the retroviral gene construct, translation, termination of transcription, transcript degradation, miRNA expression, or shRNA expression (Dambach and Winkler 2009). The aptamer and function switching domains can be used as modular components allowing for synthetic RNA devices to control gene expression either as native aptamers, mutated/evolved native aptamers, or totally synthetic aptamers that are identified from screening random RNA libraries (McKeague et al 2016).

[0348] The purine riboswitch family represents one of the largest families with over 500 sequences found (Mandal et al 2003; US20080269258; and WO2006055351). The purine riboswitches share a similar structure consisting of three conserved helical elements/stem structures (PI, P2, P3) with intervening loop/junction elements (J1-2, L2, J2-3, L3, J3-1). The aptamer domains of the purine family of riboswitches naturally vary in their affinity/regulation by various purine compounds such as adenine, guanine, adenosine, guanosine, deoxyadenosine, deoxyguanosine, etc. due to sequence variation (Kim et al. 2007)

[0349] In some embodiments, a retroviral nucleic acid described herein comprises a polynucleotide encoding the exogenous agent operably linked to a promoter and a riboswitch. The riboswitch include one or more of, e.g., all of: a.) an aptamer domain, e.g., an aptamer domain capable of binding a nucleoside analogue antiviral drug and having reduced binding to guanine or 2′-deoxyguanosine relative to the nucleoside analogue antiviral drug; and b.) a function switching domain, e.g., a function switching domain capable of regulating expression of the exogenous agent, wherein binding of the nucleoside analogue by the aptamer domain induces or suppresses the expression regulating activity of the function switching domain, thereby regulating expression of the exogenous agent. In some embodiments, the exogenous agent can be a polypeptide, an miRNA, or an shRNA. For example, in an embodiment, the riboswitch is operably linked to a nucleic acid encoding a chimeric antigen receptor (CAR). In non-limiting illustrative examples provided herein, the exogenous gene encodes one or more engineered signaling polypeptides. For instance, the riboswitch and the target polynucleotide encoding one or more engineered signaling polypeptides can be found in the genome of a source cell, in a replication incompetent recombinant retroviral particle, in a T cell and/or in an NK cell.

[0350] The aptamer domains can be used, e.g., as modular components and combined with any of the function switching domains to affect the RNA transcript. In any of the embodiments disclosed herein, the riboswitch can affect the RNA transcript by regulating any of the following activities: internal ribosomal entry site (IRES), pre-mRNA splice donor accessibility, translation, termination of transcription, transcript degradation, miRNA expression, or shRNA expression. In some embodiments, the function switching domain can control binding of an anti-IRES to an IRES (see, e.g. Ogawa, RNA (2011), 17:478-488, the disclosure of which is incorporated by reference herein in its entirety). In any of the embodiments disclosed herein, the presence or absence of the small molecule ligand can cause the riboswitch to affect the RNA transcript. In some embodiments, the riboswitch can include a ribozyme. Riboswitches with ribozymes can inhibit or enhance transcript degradation of target polynucleotides in the presence of the small molecule ligand. In some embodiments, the ribozyme can be a pistol class of ribozyme, a hammerhead class of ribozyme, a twisted class of ribozyme, a hatchet class of ribozyme, or the HDV (hepatitis delta virus).

### Non-Target Cell-Specific Regulatory Element

[0351] In some embodiments, the non-target cell specific regulatory element or negative TCSRE comprises a tissue-specific miRNA recognition sequence, tissue-specific protease recognition site, tissue-specific ubiquitin ligase site, tissue-specific transcriptional repression site, or tissue-specific epigenetic repression site.

[0352] In some embodiments, a non-target cell comprises an endogenous miRNA. The retroviral nucleic acid (e.g., the gene encoding the exogenous agent) may comprise a recognition sequence for that miRNA. Thus, if the retroviral nucleic acid enters the non-target cell, the miRNA can downregulate expression of the exogenous agent. This helps achieve additional specificity for the target cell versus non-target cells.

[0353] In some embodiments, the miRNA is a small non-coding RNAs of 20-22 nucleotides, typically excised from ^{˜}70 nucleotide foldback RNA precursor structures known as pre-miRNAs. In general, miRNAs negatively regulate their targets in one of two ways depending on the degree of complementarity between the miRNA and the target. First, miRNAs that bind with perfect or nearly perfect complementarity to protein-coding mRNA sequences typically induce the RNA-mediated interference (RNAi) pathway. miRNAs that exert their regulatory effects by binding to imperfect complementary sites within the 3′ untranslated regions (UTRs) of their mRNA targets, typically repress target-gene expression post-transcriptionally, apparently at the level of translation, through a RISC complex that is similar to, or possibly identical with, the one that is used for the RNAi pathway. Consistent with translational control, miRNAs that use this mechanism reduce the protein levels of their target genes, but the mRNA levels of these genes are only minimally affected. miRNAs (e.g., naturally occurring miRNAs or artificially designed miRNAs) can specifically target any mRNA sequence. For example, in one embodiment, the skilled artisan can design short hairpin RNA constructs expressed as human miRNA (e.g., miR-30 or miR-21) primary transcripts. This design adds a Drosha processing site to the hairpin construct and has been shown to greatly increase knockdown efficiency (Pusch et al., 2004). The hairpin stem consists of 22-nt of dsRNA (e.g., antisense has perfect complementarity to desired target) and a 15-19-nt loop from a human miR. Adding the miR loop and miR30 flanking sequences on either or both sides of the hairpin results in greater than 10-fold increase in Drosha and Dicer processing of the expressed hairpins when compared with conventional shRNA designs without microRNA. Increased Drosha and Dicer processing translates into greater siRNA/miRNA production and greater potency for expressed hairpins.

[0354] Hundreds of distinct miRNA genes are differentially expressed during development and across tissue types. Several studies have suggested important regulatory roles for miRNAs in a broad range of biological processes including developmental timing, cellular differentiation, proliferation, apoptosis, oncogenesis, insulin secretion, and cholesterol biosynthesis. (See Bartel 2004 Cell 116:281-97; Ambros 2004 Nature 431:350-55; Du et al. 2005 Development 132:4645-52; Chen 2005 N. Engl. J. Med. 353:1768-71; Krutzfeldt et al. 2005 Nature 438:685-89.) Molecular analysis has shown that miRNAs have distinct expression profiles in different tissues. Computational methods have been used to analyze the expression of approximately 7,000 predicted human miRNA targets. The data suggest that miRNA expression broadly contributes to tissue specificity of mRNA expression in many human tissues. (See Sood et al. 2006 PNAS USA 103(8):2746-51.)

[0355] Thus, an miRNA-based approach may be used for restricting expression of the exogenous agent to a target cell population by silencing exogenous agent expression in non-target cell types by using endogenous microRNA species. MicroRNA induces sequence-specific post-transcriptional gene silencing in many organisms, either by inhibiting translation of messenger RNA (mRNA) or by causing degradation of the mRNA. See, e.g., Brown et al. 2006 Nature Med. 12(5):585-91., and WO2007/000668, each of which is herein incorporated by reference in its entirety. In some embodiments, the retroviral nucleic acid comprises one or more of (e.g., a plurality of) tissue-specific miRNA recognition sequences. In some embodiments, the tissue-specific miRNA recognition sequence is about 20-25, 21-24, or 23 nucleotides in length. In embodiments, the tissue-specific miRNA recognition sequence has perfect complementarity to an miRNA present in a non-target cell. In some embodiments, the exogenous agent does not comprise GFP, e.g., does not comprise a fluorescent protein, e.g., does not comprise a reporter protein. In some embodiments, the off-target cells are not hematopoietic cell and/or the miRNA is not present in hematopoietic cells.

[0356] In some embodiments, a method herein comprises tissue-specific expression of an exogenous agent in a target cell comprising contacting a plurality of retroviral vectors comprising a nucleotide encoding the exogenous agent and at least one tissue-specific microRNA (miRNA) target sequence with a plurality of cells comprising target cells and non-target cells, wherein the exogenous agent is preferentially expressed in, e.g., restricted, to the target cell.

[0357] For example, the retroviral nucleic acid can comprise at least one miRNA recognition sequence operably linked to a nucleotide sequence having a corresponding miRNA in a non-target cell, e.g., a hematopoietic progenitor cell (HSPC), hematopoietic stem cell (HSC), which prevents or reduces expression of the nucleotide sequence in the non-target cell but not in a target cell, e.g., differentiated cell. In some embodiments, the retroviral nucleic acid comprises at least one miRNA sequence target for a miRNA which is present in an effective amount (e.g., concentration of the endogenous miRNA is sufficient to reduce or prevent expression of a transgene) in the non-target cell, and comprises a transgene. In embodiments, the miRNA used in this system is strongly expressed in non-target cells, such as HSPC and HSC, but not in differentiated progeny of e.g. the myeloid and lymphoid lineage, preventing or reducing expression of a transgene in sensitive stem cell populations, while maintaining expression and therapeutic efficacy in the target cells.

[0358] In some embodiments, the negative TSCRE or NTSCRE comprises an miRNA recognition site, e.g., a miRNA recognition site that is bound by an miRNA endogenous to hematopoietic cells. For example, the negative TSCRE or NTSCRE is a sequence that is complementary to an miRNA endogenous to a hematopoietic cell. Exemplary miRNAs are provided in Table 7 below. In some embodiments, the nucleic acid (e.g., fusosome nucleic acid or retroviral nucleic acid) comprises a sequence that is complementary to a miRNA of Table 7, or has at least 50%, 60%, 70%, 75%, 80%, 85%, 90%, 95%, 96%, 97%, 98%, or 99% complementarity thereto. In some embodiments, the nucleic acid (e.g., fusosome nucleic acid or retroviral nucleic acid) comprises a sequence that is perfectly complementary to a seed sequence within an endogenous miRNA, e.g., miRNA of Table 7. In embodiments, the seed sequence is at least 6, 7, 8, 9, or 10 nucleotides in length.

[0359] In some embodiments, the nucleic acid (e.g., fusosome nucleic acid or retroviral nucleic acid) comprises sequence that is complementary to a miRNA set forth in any one of SEQ ID NOS: 143-160, or a sequence that has at least 50%, 60%, 70%, 75%, 80%, 85%, 90%, 95%, 96%, 97%, 98%, or 99% complementarity thereto. In some embodiments, the nucleic acid (e.g., fusosome nucleic acid or retroviral nucleic acid) includes a TSCRE or NTSCRE that comprises a sequence that is perfectly complementary to a seed sequence within an endogenous miRNA set forth in any one of SEQ ID NOS: 143-160. In embodiments, the seed sequence is at least 6, 7,8, 9, or 10nucleotides in length.

TABLE 7
Exemplary miRNA sequences.

| | | | | SEQ |
|---|---|---|---|---|
| Silenced cell | miRNA | | | ID |
| type | name | Mature miRNA | miRNA sequence | NO |
| hematopoietic | miR-142 | hsa-miR-142-3p | uguaguguuuccuacuuuaugga | 143 |
| cells | | | | |
| hematopoietic | miR-142 | hsa-miR-142-5p | cauaaaguagaaagcacuacu | 144 |
| cells | | | | |
| hematopoietic | mir-181a-2 | hsa-miR-181a-5p | aacauucaacgcugucggugagu | 145 |
| cells | | | | |
| hematopoietic | mir-181a-2 | hsa-miR-181a-2-3p | accacugaccguugacuguacc | 146 |
| cells | | | | |
| hematopoietic | mir-181b-1 | hsa-miR-181b-5p | aacauucauugcugucggugggu | 147 |
| cells | | | | |
| hematopoietic | mir-181b-1 | hsa-miR-181b-3p | cucacugaacaaugaaugcaa | 148 |
| cells | | | | |
| hematopoietic | mir-181c | hsa-miR-181c-5p | aacauucaaccugucggugagu | 149 |
| cells | | | | |
| hematopoietic | mir-181c | hsa-miR-181c-3p | aaccaucgaccguugaguggac | 150 |
| cells | | | | |
| hematopoietic | mir-181a-1 | hsa-miR-181a | aacauucaacgcugucggugagu | 151 |
| cells | | | | |
| hematopoietic | mir-181a-1 | hsa-miR-181a-3p | accaucgaccguugauuguacc | 152 |
| cells | | | | |
| hematopoietic | mir-181b-2 | hsa-miR-181b-5p | aacauucauugcugucggugggu | 153 |
| cells | | | | |
| hematopoietic | mir-181b-2 | hsa-miR-181b-2-3p | cucacugaucaaugaaugca | 154 |
| cells | | | | |
| hematopoietic | mir-181d | hsa-miR-181d-5p | aacauucauuguugucggugggu | 155 |
| cells | | | | |
| hematopoietic | mir-181d | hsa-miR-181d-3p | ccaccgggggaugaaugucac | 156 |
| cells | | | | |
| hematopoietic | miR-223 | hsa-miR-223-5p | cguguauuugacaagcugaguu | 157 |
| cells | | | | |
| hematopoietic | miR-223 | hsa-miR-223-3p | ugucaguuugucaaauacccca | 158 |
| cells | | | | |
| pDCs | miR-126 | hsa-miR-126-5p | cauuauuacuuuugguacgcg | 159 |
| pDCs | miR-126 | hsa-miR-126-3p | ucguaccgugaguaauaaugcg | 160 |

[0360] In some embodiments, the negative TSCRE or NTSCRE comprises an miRNA recognition site for an miRNA described herein. Exemplary miRNAs include those found in Griffiths-Jones et al. Nucleic Acids Res. 2006 Jan. 1, 34; Chen and Lodish, Semin Immunol. 2005 April; 17(2):155-65; Chen et al. Science. 2004 Jan. 2; 303(5654):83-6; Barad et al. Genome Res. 2004 December; 14(12): 2486-2494; Krichevsky et al., RNA. 2003 October; 9(10):1274-81; Kasashima et al. Biochem Biophys Res Commun. 2004 Sep. 17; 322(2):403-10; Houbaviy et al., Dev Cell. 2003 August; 5(2):351-8; Lagos-Quintana et al., Curr Biol. 2002 Apr. 30; 12(9):735-9; Calin et al., Proc Natl Acad Sci USA. 2004 Mar. 2; 101(9):2999-3004; Sempere et al. Genome Biol. 2004; 5(3): R13; Metzler et al., Genes Chromosomes Cancer. 2004 February; 39(2):167-9; Calin et al., Proc Natl Acad Sci USA. 2002 Nov. 26; 99(24):15524-9; Mansfield et al. Nat Genet. 2004 October; 36(10):1079-83; Michael et al. Mol Cancer Res. 2003 October; 1(12):882-91; and at www.miRNA.org.

[0361] In some embodiments, the negative TSCRE or NTSCRE comprises an miRNA recognition site for an miRNA selected from miR-1b, miR-189b, miR-93, miR-125b, miR-130, miR-32, miR-128, miR-22, miR124a, miR-296, miR-143, miR-15, miR-141, miR-143, miR-16, miR-127, miR99a, miR-183, miR-19b, miR-92, miR-9, miR-130b, miR-21, miR-30b, miR-16, miR-142-s, miR-99a, miR-212, miR-30c, miR-213, miR-20, miR-155, miR-152, miR-139, miR-30b, miR-7, miR-30c, miR-18, miR-137, miR-219, miR-1d, miR-178, miR-24, miR-122a, miR-215, miR-142-a, miR-223, miR-142, miR-124a, miR-190, miR-149, miR-193, miR-181, let-7a, miR-132, miR-27a, miR-9*, miR-200b, miR-266, miR-153, miR-135, miR-206, miR-24, miR-19a, miR-199, miR-26a, miR-194, miR-125a, miR-15a, miR-145, miR-133, miR-96, miR-131, miR-124b, miR-151, miR-7b, miR-103, and miR-208.

[0362] In some embodiments, the nucleic acid (e.g., fusosome nucleic acid or retroviral nucleic acid) comprises two or more miRNA recognition sites. In some embodiments, each of the two or more miRNA recognition sites are recognized by an miRNA as described herein, e.g., such as any set forth in of Table 7. In some embodiments, each of the two or more miRNA recognition sites are recognized by an miRNA set forth in any one of SEQ ID NOS: 143-160. In some embodiments, the two or more miRNA recognition sites can include 2, 3, 4, 5, 6, 7, 8, 9, 10 or more miRNA recognition sites. The two or more miRNA recognition sites can be positioned in tandem in the nucleic acid to provide multiple, tandem-binding sites for a miRNA.

[0363] In some embodiments, the two or more miRNA recognition sites can include at least one first miRNA recognition site, such as 1, 2, 3, 4, 5, 6 or more first miRNA recognition sites, and at least one second miRNA recognition site, such as 1, 2, 3, 4, 5, 6 or more second miRNA recognition sites. In some embodiments, the nucleic acid contains two or more first miRNA recognition site and each of the first miRNA recognition sites are present in tandem in the nucleic acid to provide multiple, tandem-binding sites for a first miRNA and/or the nucleic acid contains two more second miRNA recognition site and each of the second miRNA recognition sites are present in tandem in the nucleic acid to provide multiple, tandem-binding sites for a second miRNA. In some embodiments, the first miRNA recognition site and second miRNA recognition site are recognized by the same miRNA, and in some embodiments, the first miRNA recognition site and second miRNA recognition site are recognized by different miRNAs. In some embodiments, the first miRNA recognition site and second miRNA recognition site are recognized by miRNAs present in the same non-target cell, and in some embodiments, the first miRNA recognition site and second miRNA recognition site are recognized by miRNAs present in different non-target cells. In some embodiments, one or both of the first miRNA recognition site and second miRNA recognition site are recognized by miRNAs as described herein, such as any set forth in Table 7. In some embodiments, one or both of the first miRNA recognition site and second miRNA recognition site are recognized by an miRNAs set forth in any one of SEQ ID NOS: 143-160. In some embodiments, one or more of the miRNA recognition sites on the fusosome nucleic acid (e.g. retroviral nucleic acid) are transcribed in cis with the exogenous agent. In some embodiments, one or more of the miRNA recognition sites on the fusosome nucleic acid (e.g., retroviral nucleic acid) are situated downstream of the poly A tail sequence, e.g., between the poly A tail sequence and the WPRE. In some embodiments, one or more of the miRNA recognition sites on the fusosome nucleic acid (e.g., retroviral nucleic acid) are situated downstream of the WPRE.

### Immune Modulation

[0364] In some embodiments, a retroviral vector or VLP described herein comprises elevated CD47. See, e.g., U.S. Pat. No. 9,050,269, which is herein incorporated by reference in its entirety. In some embodiments, a retroviral vector or VLP described herein comprises elevated Complement Regulatory protein. See, e.g., ES2627445T3 and U.S. Pat. No. 6,790,641, each of which is incorporated herein by reference in its entirety. In some embodiments, a retroviral vector or VLP described herein lacks or comprises reduced levels of an MHC protein, e.g., an MHC-1 class 1 or class II. See, e.g., US20170165348, which is herein incorporated by reference in its entirety.

[0365] Sometimes retroviral vectors or VLPs are recognized by the subject's immune system. In the case of enveloped viral vector particles (e.g., retroviral vector particles), membrane-bound proteins that are displayed on the surface of the viral envelope may be recognized and the viral particle itself may be neutralised. Furthermore, on infecting a target cell, the viral envelope becomes integrated with the cell membrane and as a result viral envelope proteins may become displayed on or remain in close association with the surface of the cell. The immune system may therefore also target the cells which the viral vector particles have infected. Both effects may lead to a reduction in the efficacy of exogenous agent delivery by viral vectors.

[0366] A viral particle envelope typically originates in a membrane of the source cell. Therefore, membrane proteins that are expressed on the cell membrane from which the viral particle buds may be incorporated into the viral envelope.

### The Immune Modulating Protein CD47

[0367] The internalization of extracellular material into cells is commonly performed by a process called endocytosis (Rabinovitch, 1995, Trends Cell Biol. 5(3):85-7; Silverstein, 1995, Trends Cell Biol. 5(3):141-2; Swanson et al., 1995, Trends Cell Biol. 5(3):89-93; Allen et al., 1996, J. Exp. Med. 184(2):627-37). Endocytosis may fall into two general categories: phagocytosis, which involves the uptake of particles, and pinocytosis, which involves the uptake of fluid and solutes.

[0368] Professional phagocytes have been shown to differentiate from non-self and self, based on studies with knockout mice lacking the membrane receptor CD47 (Oldenborg et al., 2000, Science 288(5473):2051-4). CD47 is a ubiquitous member of the Ig superfamily that interacts with the immune inhibitory receptor SIRPa (signal regulatory protein) found on macrophages (Fujioka et al., 1996, Mol. Cell. Biol. 16(12):6887-99; Veillette et al., 1998, J. Biol. Chem. 273(35):22719-28; Jiang et al., 1999, J. Biol. Chem. 274(2):559-62). Although CD47-SIRPa interactions appear to deactivate autologous macrophages in mouse, severe reductions of CD47 (perhaps 90%) are found on human blood cells from some Rh genotypes that show little to no evidence of anemia (Mouro-Chanteloup et al., 2003, Blood 101(1):338-344) and also little to no evidence of enhanced cell interactions with phagocytic monocytes (Arndt et al., 2004, Br. J. Haematol. 125(3):412-4).

[0369] In some embodiments, a retroviral vector or VLP (e.g., a viral particle having a radius of less than about 1 m, less than about 400 nm, or less than about 150 nm), comprises at least a biologically active portion of CD47, e.g., on an exposed surface of the retroviral vector or VLP. In some embodiments, the retroviral vector (e.g., lentivirus) or VLP includes a lipid coat. In embodiments, the amount of the biologically active CD47 in the retroviral vector or VLP is between about 20-250, 20-50, 50-100, 100-150, 150-200, or 200-250 molecules/m². In some embodiments, the CD47 is human CD47.

[0370] A method described herein can comprise evading phagocytosis of a particle by a phagocytic cell. The method may include expressing at least one peptide including at least a biologically active portion of CD47 in a retroviral vector or VLP so that, when the retroviral vector or VLP comprising the CD47 is exposed to a phagocytic cell, the viral particle evades phacocytosis by the phagocytic cell, or shows decreased phagocytosis compared to an otherwise similar unmodified retroviral vector or VLP. In some embodiments, the half-life of the retroviral vector or VLP in a subject is extended compared to an otherwise similar unmodified retroviral vector or VLP.

[0371] MHC Deletion

[0372] The major histocompatibility complex class I (MHC-I) is a host cell membrane protein that can be incorporated into viral envelopes and, because it is highly polymorphic in nature, it is a major target of the body's immune response (McDevitt H. O. (2000) Annu. Rev. Immunol. 18: 1-17). MHC-I molecules exposed on the plasma membrane of source cells can be incorporated in the viral particle envelope during the process of vector budding. These MHC-I molecules derived from the source cells and incorporated in the viral particles can in turn be transferred to the plasma membrane of target cells. Alternatively, the MHC-I molecules may remain in close association with the target cell membrane as a result of the tendency of viral particles to absorb and remain bound to the target cell membrane.

[0373] The presence of exogenous MHC-I molecules on or close to the plasma membrane of transduced cells may elicit an alloreactive immune response in subjects. This may lead to immune-mediated killing or phagocytosis of transduced cells either upon ex vivo gene transfer followed by administration of the transduced cells to the subject, or upon direct in vivo administration of the viral particles. Furthermore, in the case of in vivo administration of MHC-I bearing viral particles into the bloodstream, the viral particles may be neutralised by pre-existing MHC-I specific antibodies before reaching their target cells.

[0374] Accordingly, in some embodiments, a source cell is modified (e.g., genetically engineered) to decrease expression of MHC-I on the surface of the cell. In embodiments, the source comprises a genetically engineered disruption of a gene encoding β2-microglobulin (β2M). In embodiments, the source cell comprises a genetically engineered disruption of one or more genes encoding an MHC-I a chain. The cell may comprise genetically engineered disruptions in all copies of the gene encoding β2-microglobulin. The cell may comprise genetically engineered disruptions in all copies of the genes encoding an MHC-I a chain. The cell may comprise both genetically engineered disruptions of genes encoding β2-microglobulin and genetically engineered disruptions of genes encoding an MHC-I a chain. In some embodiments, the retroviral vector or VLP comprises a decreased number of surface-exposed MHC-I molecules. The number of surface-exposed MHC-I molecules may be decreased such that the immune response to the MHC-I is decreased to a therapeutically relevant degree. In some embodiments, the enveloped viral vector particle is substantially devoid of surface-exposed MHC-I molecules.

[0375] HLA-G/E Overexpression

[0376] In some embodiments, a retroviral vector or VLP displays on its envelope a tolerogenic protein, e.g., an ILT-2 or ILT-4 agonist, e.g., HLA-E or HLA-G or any other ILT-2 or ILT-4 agonist. In some embodiments, a retroviral vector or VLP has increased expression of HLA-E, HLA-G, ILT-2 or ILT-4 compared to a reference retrovirus, e.g., an unmodified retrovirus otherwise similar to the retrovirus.

[0377] In some embodiments, a retrovirus composition has decreased MHC Class I compared to an unmodified retrovirus and increased HLA-G compared to an unmodified retrovirus.

[0378] In some embodiments, the retroviral vector or VLP has an increase in expression of HLA-G or HLA-E, e.g., an increase in expression of 1%, 5%, 10%, 20%, 30%, 40%, 50%, 60%, 70%, 80%, 90%, or more of HLA-G or HLA-E, compared to a reference retrovirus, e.g., an unmodified retrovirus otherwise similar to the retrovirus, wherein expression of HLA-G or HLA-E is assayed in vitro using flow cytometry, e.g., FACS.

[0379] In some embodiments, the retrovirus with increased HLA-G expression demonstrates reduced immunogenicity, e.g., as measured by reduced immune cell infiltration, in a teratoma formation assay.

[0380] Complement Regulatory Proteins

[0381] Complement activity is normally controlled by a number of complement regulatory proteins (CRPs). These proteins prevent spurious inflammation and host tissue damage. One group of proteins, including CD55/decay accelerating factor (DAF) and CD46/membrane cofactor protein (MCP), inhibits the classical and alternative pathway C3/C5 convertase enzymes. Another set of proteins including CD59 regulates MAC assembly. CRPs have been used to prevent rejection of xenotransplanted tissues and have also been shown to protect viruses and viral vectors from complement inactivation.

[0382] Membrane resident complement control factors include, e.g., decay-accelerating factor (DAF) or CD55, factor H (FH)-like protein-1 (FHL-1), C4b-binding protein (C4BP), Complement receptor 1 (CD35), membrane cofactor protein (MCP) or CD46, and CD59 (protectin) (e.g., to prevent the formation of membrane attack complex (MAC) and protect cells from lysis).

[0383] Albumin Binding Protein

[0384] In some embodiments the lentivirus binds albumin. In some embodiments the lentivirus comprises on its surface a protein that binds albumin. In some embodiments the lentivirus comprises on its surface an albumin binding protein. In some embodiments the albumin binding protein is streptococcal Albumin Binding protein. In some embodiments the albumin binding protein is streptococcal Albumin Binding Domain.

[0385] Expression of Non-Fusogen Proteins on the Lentiviral Envelope

[0386] In some embodiments the lentivirus is engineered to comprise one or more proteins on its surface. In some embodiments the proteins affect immune interactions with a subject. In some embodiments the proteins affect the pharmacology of the lentivirus in the subject. In some embodiments the protein is a receptor. In some embodiments the protein is an agonist. In some embodiments the protein is a signaling molecule. In some embodiments, the protein on the lentiviral surface comprises an anti-CD3 antibody (e.g., OKT3) or IL7.

[0387] In some embodiments, a mitogenic transmembrane protein and/or a cytokine-based transmembrane protein is present in the source cell, which can be incorporated into the retrovirus when it buds from the source cell membrane. The mitogenic transmembrane protein and/or a cytokine-based transmembrane protein can be expressed as a separate cell surface molecule on the source cell rather than being part of the viral envelope glycoprotein.

[0388] In some embodiments of any of the aspects described herein, the retroviral vector, VLP, or pharmaceutical composition is substantially non-immunogenic. Immunogenicity can be quantified, e.g., as described herein.

[0389] In some embodiments, a retroviral vector or VLP fuses with a target cell to produce a recipient cell. In some embodiments, a recipient cell that has fused to one or more retroviral vectors or VLPs is assessed for immunogenicity. In embodiments, a recipient cell is analyzed for the presence of antibodies on the cell surface, e.g., by staining with an anti-IgM antibody. In other embodiments, immunogenicity is assessed by a PBMC cell lysis assay. In embodiments, a recipient cell is incubated with peripheral blood mononuclear cells (PBMCs) and then assessed for lysis of the cells by the PBMCs. In other embodiments, immunogenicity is assessed by a natural killer (NK) cell lysis assay. In embodiments, a recipient cell is incubated with NK cells and then assessed for lysis of the cells by the NK cells. In other embodiments, immunogenicity is assessed by a CD8+ T-cell lysis assay. In embodiments, a recipient cell is incubated with CD8+ T-cells and then assessed for lysis of the cells by the CD8+ T-cells.

[0390] In some embodiments, the retroviral vector or VLP comprises elevated levels of an immunosuppressive agent (e.g., immunosuppressive protein) as compared to a reference retroviral vector or VLP, e.g., one produced from an unmodified source cell otherwise similar to the source cell, or a HEK293 cell. In some embodiments, the elevated level is at least 5%, 10%, 20%, 30%, 40%, 50%, 60%, 70%, 80%, 90%, 2-fold, 3-fold, 5-fold, 10-fold, 20-fold, 50-fold, or 100-fold. In some embodiments, the retroviral vector or VLP comprises an immunosuppressive agent that is absent from the reference cell. In some embodiments, the retroviral vector or VLP comprises reduced levels of an immunostimulatory agent (e.g., immunostimulatory protein) as compared to a reference retroviral vector or VLP, e.g., one produced from an unmodified source cell otherwise similar to the source cell, or a HEK293 cell. In some embodiments, the reduced level is at least 5%, 10%, 20%, 30%, 40%, 50%, 60%, 70%, 80%, 90%, 95%, 98%, or 99% compared to the reference retroviral vector or VLP. In some embodiments, the immunostimulatory agent is substantially absent from the retroviral vector or VLP.

[0391] In some embodiments, the retroviral vector or VLP, or the source cell from which the retroviral vector or VLP is derived, has one, two, three, four, five, six, seven, eight, nine, ten, eleven, twelve, or more of the following characteristics:
[0392] a. less than 50%, 40%, 30%, 20%, 15%, 10%, or 5% or lesser expression of MHC class I or MHC class II, compared to a reference retroviral vector or VLP, e.g., an unmodified retroviral vector or VLP from a source cell otherwise similar to the source cell, or a HeLa cell, or a HEK293 cell;
[0393] b. less than 50%, 40%, 30%, 20%, 15%, 10%, or 5% or lesser expression of one or more co-stimulatory proteins including but not limited to: LAG3, ICOS-L, ICOS, Ox40L, OX40, CD28, B7, CD30, CD30L 4-1BB, 4-1BBL, SLAM, CD27, CD70, HVEM, LIGHT, B7-H3, or B7-H4, compared to a reference retroviral vector or VLP, e.g., an unmodified retroviral vector or VLP from a cell otherwise similar to the source cell, or a HEK cell, or a reference cell described herein;
[0394] c. expression of surface proteins which suppress macrophage engulfment e.g., CD47, e.g., detectable expression by a method described herein, e.g., more than 1.5-fold, 2-fold, 3-fold, 4-fold, 5-fold, 10-fold, or more expression of the surface protein which suppresses macrophage engulfment, e.g., CD47, compared to a reference retroviral vector or VLP, e.g., an unmodified retroviral vector or VLP from a cell otherwise similar to the source cell, a Jurkat cell, or a HEK293 cell;
[0395] d. expression of soluble immunosuppressive cytokines, e.g., IL-10, e.g., detectable expression by a method described herein, e.g., more than 1.5-fold, 2-fold, 3-fold, 4-fold, 5-fold, 10-fold, or more expression of soluble immunosuppressive cytokines, e.g., IL-10, compared to a reference retroviral vector or VLP, e.g., an unmodified retroviral vector or VLP from a cell otherwise similar to the source cell, or a HEK293 cell;
[0396] e. expression of soluble immunosuppressive proteins, e.g., PD-L1, e.g., detectable expression by a method described herein, e.g., more than 1.5-fold, 2-fold, 3-fold, 4-fold, 5-fold, 10-fold, or more expression of soluble immunosuppressive proteins, e.g., PD-L1, compared to a reference retroviral vector or VLP, e.g., an unmodified retroviral vector or VLP from a cell otherwise similar to the source cell, or a HEK293 cell;
[0397] f. less than 50%, 40%, 30%, 20%, 15%, 10%, or 5% or lesser expression of soluble immune stimulating cytokines, e.g., IFN-gamma or TNF-α, compared to a reference retroviral vector or VLP, e.g., an unmodified retroviral vector or VLP from a cell otherwise similar to the source cell, or a HEK293 cell or a U-266 cell;
[0398] g. less than 50%, 40%, 30%, 20%, 15%, 10%, or 5% or lesser expression of endogenous immune-stimulatory antigen, e.g., Zg16 or Hormad1, compared to a reference retroviral vector or VLP, e.g., an unmodified retroviral vector or VLP from a cell otherwise similar to the source cell, or a HEK293 cell or an A549 cell, or a SK-BR-3 cell;
[0399] h. expression of, e.g., detectable expression by a method described herein, HLA-E or HLA-G, compared to a reference retroviral vector or VLP, e.g., an unmodified retroviral vector or VLP from a cell otherwise similar to the source cell, a HEK293 cell, or a or a Jurkat cell;
[0400] i. surface glycosylation profile, e.g., containing sialic acid, which acts to, e.g., suppress NK cell activation;
[0401] j. less than 50%, 40%, 30%, 20%, 15%, 10%, or 5% or lesser expression of TCRα/β, compared to a reference retroviral vector or VLP, e.g., an unmodified retroviral vector or VLP from a cell otherwise similar to the source cell, a HEK293 cell, or a Jurkat cell;
[0402] k. less than 50%, 40%, 30%, 20%, 15%, 10%, or 5% or lesser expression of ABO blood groups, compared to a reference retroviral vector or VLP, e.g., an unmodified retroviral vector or VLP from a cell otherwise similar to the source cell, a HEK293 cell, or a HeLa cell;
[0403] l. less than 50%, 40%, 30%, 20%, 15%, 10%, or 5% or lesser expression of Minor Histocompatibility Antigen (MHA), compared to a reference retroviral vector or VLP, e.g., an unmodified retroviral vector or VLP from a cell otherwise similar to the source cell, a HEK293 cell, or a Jurkat cell; or
[0404] m. has less than 10%, 9%, 8%, 7%, 6%, 5%, 4%, 3%, 2%, 1%, or less, of mitochondrial MHAs, compared to a reference retroviral vector or VLP e.g., an unmodified retroviral vector or VLP from a cell otherwise similar to the source cell, a HEK293 cell, or a Jurkat cell, or has no detectable mitochondrial MHAs.

[0405] In embodiments, the co-stimulatory protein is 4-1BB, B7, SLAM, LAG3, HVEM, or LIGHT, and the reference cell is HDLM-2. In some embodiments, the co-stimulatory protein is BY-H3 and the reference cell is HeLa. In some embodiments, the co-stimulatory protein is ICOSL or B7-H4, and the reference cell is SK-BR-3. In some embodiments, the co-stimulatory protein is ICOS or OX40, and the reference cell is MOLT-4. In some embodiments, the co-stimulatory protein is CD28, and the reference cell is U-266. In some embodiments, the co-stimulatory protein is CD30L or CD27, and the reference cell is Daudi.

[0406] In some embodiments, the retroviral vector, VLP, or pharmaceutical composition does not substantially elicit an immunogenic response by the immune system, e.g., innate immune system. In embodiments, an immunogenic response can be quantified, e.g., as described herein. In some embodiments, the an immunogenic response by the innate immune system comprises a response by innate immune cells including, but not limited to NK cells, macrophages, neutrophils, basophils, eosinophils, dendritic cells, mast cells, or gamma/delta T cells. In some embodiments, an immunogenic response by the innate immune system comprises a response by the complement system which includes soluble blood components and membrane bound components.

[0407] In some embodiments, the retroviral vector, VLP, or pharmaceutical composition does not substantially elicit an immunogenic response by the immune system, e.g., adaptive immune system. In some embodiments, an immunogenic response by the adaptive immune system comprises an immunogenic response by an adaptive immune cell including, but not limited to a change, e.g., increase, in number or activity of T lymphocytes (e.g., CD4 T cells, CD8 T cells, and or gamma-delta T cells), or B lymphocytes. In some embodiments, an immunogenic response by the adaptive immune system includes increased levels of soluble blood components including, but not limited to a change, e.g., increase, in number or activity of cytokines or antibodies (e.g., IgG, IgM, IgE, IgA, or IgD).

[0408] In some embodiments, the retroviral vector, VLP, or pharmaceutical composition is modified to have reduced immunogenicity. In some embodiments, the retroviral vector, VLP, or pharmaceutical composition has an immunogenicity less than 5%, 10%, 20%, 30%, 40%, or 50% lesser than the immunogenicity of a reference retroviral vector or VLP, e.g., an unmodified retroviral vector or VLP from a cell otherwise similar to the source cell, a HEK293 cell, or a Jurkat cell.

[0409] In some embodiments of any of the aspects described herein, the retroviral vector, VLP, or pharmaceutical composition is derived from a source cell, e.g., a mammalian cell, having a modified genome, e.g., modified using a method described herein, to reduce, e.g., lessen, immunogenicity. Immunogenicity can be quantified, e.g., as described herein.

[0410] In some embodiments, the retroviral vector, VLP, or pharmaceutical composition is derived from a mammalian cell depleted of, e.g., with a knock out of, one, two, three, four, five, six, seven or more of the following:
[0411] a. MHC class I, MHC class II or MHA;
[0412] b. one or more co-stimulatory proteins including but not limited to: LAG3, ICOS-L, ICOS, Ox40L, OX40, CD28, B7, CD30, CD30L 4-1BB, 4-1BBL, SLAM, CD27, CD70, HVEM, LIGHT, B7-H3, or B7-H4;
[0413] c. soluble immune-stimulating cytokines e.g., IFN-gamma or TNF-α;
[0414] d. endogenous immune-stimulatory antigen, e.g., Zg16 or Hormad1;
[0415] e. T-cell receptors (TCR);
[0416] f. The genes encoding ABO blood groups, e.g., ABO gene;
[0417] g. transcription factors which drive immune activation, e.g., NFκB;
[0418] h. transcription factors that control MHC expression e.g., class II trans-activator (CIITA), regulatory factor of the Xbox 5 (RFX5), RFX-associated protein (RFXAP), or RFX ankyrin repeats (RFXANK; also known as RFXB); or
[0419] i. TAP proteins, e.g., TAP2, TAP1, or TAPBP, which reduce MHC class I expression.

[0420] In some embodiments, the retroviral vector or VLP is derived from a source cell with a genetic modification which results in increased expression of an immunosuppressive agent, e.g., one, two, three or more of the following (e.g., wherein before the genetic modification the cell did not express the factor):
[0421] a. surface proteins which suppress macrophage engulfment, e.g., CD47; e.g., increased expression of CD47 compared to a reference retroviral vector or VLP, e.g., an unmodified retroviral vector or VLP from a cell otherwise similar to the source cell, a HEK293 cell, or a Jurkat cell;
[0422] b. soluble immunosuppressive cytokines, e.g., IL-10, e.g., increased expression of IL-10 compared to a reference retroviral vector or VLP, e.g., an unmodified retroviral vector or VLP from a cell otherwise similar to the source cell, a HEK293 cell, or a Jurkat cell;
[0423] c. soluble immunosuppressive proteins, e.g., PD-1, PD-L1, CTLA4, or BTLA; e.g., increased expression of immunosuppressive proteins compared to a reference retroviral vector or VLP, e.g., an unmodified retroviral vector or VLP from a cell otherwise similar to the cell source, a HEK293 cell, or a Jurkat cell;
[0424] d. a tolerogenic protein, e.g., an ILT-2 or ILT-4 agonist, e.g., HLA-E or HLA-G or any other endogenous ILT-2 or ILT-4 agonist, e.g., increased expression of HLA-E, HLA-G, ILT-2 or ILT-4 compared to a reference retroviral vector or VLP, e.g., an unmodified retroviral vector or VLP from a cell otherwise similar to the source cell, a HEK293 cell, or a Jurkat cell; or
[0425] e. surface proteins which suppress complement activity, e.g., complement regulatory proteins, e.g. proteins that bind decay-accelerating factor (DAF, CD55), e.g. factor H (FH)-like protein-1 (FHL-1), e.g. C4b-binding protein (C4BP), e.g. complement receptor 1 (CD35), e.g. Membrane cofactor protein (MCP, CD46), eg. Profectin (CD59), e.g. proteins that inhibit the classical and alternative complement pathway CD/C5 convertase enzymes, e.g. proteins that regulate MAC assembly; e.g. increased expression of a complement regulatory protein compared to a reference retroviral vector or VLP, e.g. an unmodified retroviral vector or VLP from a cell otherwise similar to the source cell, a HEK293 cell, or a Jurkat cell.

[0426] In some embodiments, the increased expression level is at least 5%, 10%, 20%, 30%, 40%, 50%, 60%, 70%, 80%, 90%, 2-fold, 3-fold, 5-fold, 10-fold, 20-fold, 50-fold, or 100-fold higher as compared to a reference retroviral vector or VLP.

[0427] In some embodiments, the retroviral vector or VLP is derived from a source cell modified to have decreased expression of an immunostimulatory agent, e.g., one, two, three, four, five, six, seven, eight or more of the following:
[0428] a. less than 50%, 40%, 30%, 20%, 15%, 10%, or 5% or lesser expression of MHC class I or MHC class II, compared to a reference retroviral vector or VLP, e.g., an unmodified retroviral vector or VLP from a cell otherwise similar to the source cell, a HEK293 cell, or a HeLa cell;
[0429] b. less than 50%, 40%, 30%, 20%, 15%, 10%, or 5% or lesser expression of one or more co-stimulatory proteins including but not limited to: LAG3, ICOS-L, ICOS, Ox40L, OX40, CD28, B7, CD30, CD30L 4-1BB, 4-1BBL, SLAM, CD27, CD70, HVEM, LIGHT, B7-H3, or B7-H4, compared to a reference retroviral vector or VLP, e.g., an unmodified retroviral vector or VLP from a cell otherwise similar to the source cell, a HEK293 cell, or a reference cell described herein;
[0430] c. less than 50%, 40%, 30%, 20%, 15%, 10%, or 5% or lesser expression of soluble immune stimulating cytokines, e.g., IFN-gamma or TNF-α, compared to a reference retroviral vector or VLP, e.g., an unmodified retroviral vector or VLP from a cell otherwise similar to the source cell, a HEK293 cell, or a U-266 cell;
[0431] d. less than 50%, 40%, 30%, 20%, 15%, 10%, or 5% or lesser expression of endogenous immune-stimulatory antigen, e.g., Zg16 or Hormad1, compared to a reference retroviral vector or VLP, e.g., an unmodified retroviral vector or VLP from a cell otherwise similar to the source cell, a HEK293 cell, or an A549 cell or a SK-BR-3 cell;
[0432] e. less than 50%, 40%, 30%, 20%, 15%, 10%, or 5% or lesser expression of T-cell receptors (TCR) compared to a reference retroviral vector or VLP, e.g., an unmodified retroviral vector or VLP from a cell otherwise similar to the source cell, a HEK293 cell, or a Jurkat cell;
[0433] f. less than 50%, 40%, 30%, 20%, 15%, 10%, or 5% or lesser expression of ABO blood groups, compared to a reference retroviral vector or VLP, e.g., an unmodified retroviral vector or VLP from a cell otherwise similar to the source cell, a HEK293 cell, or a HeLa cell;
[0434] g. less than 50%, 40%, 30%, 20%, 15%, 10%, or 5% or lesser expression of transcription factors which drive immune activation, e.g., NFkB; compared to a reference retroviral vector or VLP, e.g., an unmodified retroviral vector or VLP from a cell otherwise similar to the source cell, a HEK293 cell, or a Jurkat cell
[0435] h. less than 50%, 40%, 30%, 20%, 15%, 10%, or 5% or lesser expression of transcription factors that control MHC expression, e.g., class II trans-activator (CIITA), regulatory factor of the Xbox 5 (RFX5), RFX-associated protein (RFXAP), or RFX ankyrin repeats (RFXANK; also known as RFXB) compared to a reference retroviral vector or VLP, e.g., an unmodified retroviral vector or VLP from a cell otherwise similar to the source cell, a HEK293 cell, or a Jurkat cell; or
[0436] i. less than 50%, 40%, 30%, 20%, 15%, 10%, or 5% or lesser expression of TAP proteins, e.g., TAP2, TAP1, or TAPBP, which reduce MHC class I expression compared to a reference retroviral vector or VLP, e.g., an unmodified retroviral vector or VLP from a cell otherwise similar to the source cell, a HEK293 cell, or a HeLa cell.

[0437] In some embodiments, a retroviral vector, VLP, or pharmaceutical composition derived from a mammalian cell, e.g., a HEK293, modified using shRNA expressing lentivirus to decrease MHC Class I expression, has lesser expression of MHC Class I compared to an unmodified retroviral vector or VLP, e.g., a retroviral vector or VLP from a cell (e.g., mesenchymal stem cell) that has not been modified. In some embodiments, a retroviral vector or VLP derived from a mammalian cell, e.g., a HEK293, modified using lentivirus expressing HLA-G to increase expression of HLA-G, has increased expression of HLA-G compared to an unmodified retroviral vector or VLP, e.g., from a cell (e.g., a HEK293) that has not been modified.

[0438] In some embodiments, the retroviral vector, VLP, or pharmaceutical composition is derived from a source cell, e.g., a mammalian cell, which is not substantially immunogenic, wherein the source cells stimulate, e.g., induce, T-cell IFN-gamma secretion, at a level of 0 μg/mL to >0 μg/mL, e.g., as assayed in vitro, by IFN-gamma ELISPOT assay.

[0439] In some embodiments, the retroviral vector, VLP, or pharmaceutical composition is derived from a source cell, e.g., a mammalian cell, wherein the mammalian cell is from a cell culture treated with an immunosuppressive agent, e.g., a glucocorticoid (e.g., dexamethasone), cytostatic (e.g., methotrexate), antibody (e.g., Muromonab (OKT3)-CD3), or immunophilin modulator (e.g., Ciclosporin or rapamycin).

[0440] In some embodiments, the retroviral vector, VLP, or pharmaceutical composition is derived from a source cell, e.g., a mammalian cell, wherein the mammalian cell comprises an exogenous agent, e.g., a therapeutic agent.

[0441] In some embodiments, the retroviral vector, VLP, or pharmaceutical composition is derived from a source cell, e.g., a mammalian cell, wherein the mammalian cell is a recombinant cell.

[0442] In some embodiments, the retroviral vector, VLP, or pharmaceutical is derived from a mammalian cell genetically modified to express viral immunoevasins, e.g., hCMV US2, or US11.

[0443] In some embodiments, the surface of the retroviral vector or VLP, or the surface of the source cell, is covalently or non-covalently modified with a polymer, e.g., a biocompatible polymer that reduces immunogenicity and immune-mediated clearance, e.g., PEG.

[0444] In some embodiments, the surface of the retroviral vector or VLP, or the surface of the source cell is covalently or non-covalently modified with a sialic acid, e.g., a sialic acid comprising glycopolymers, which contain NK-suppressive glycan epitopes.

[0445] In some embodiments, the surface of the retroviral vector or VLP, or the surface of the source cell is enzymatically treated, e.g., with glycosidase enzymes, e.g., α-N-acetylgalactosaminidases, to remove ABO blood groups In some embodiments, the surface of the retroviral vector or VLP, or the surface of the source cell is enzymatically treated, to give rise to, e.g., induce expression of, ABO blood groups which match the recipient's blood type.

### Parameters for Assessing Immunogenicity

[0446] In some embodiments, the retroviral vector or VLP is derived from a source cell, e.g., a mammalian cell which is not substantially immunogenic, or modified, e.g., modified using a method described herein, to have a reduction in immunogenicity. Immunogenicity of the source cell and the retroviral vector or VLP can be determined by any of the assays described herein.

[0447] In some embodiments, the retroviral vector or VLP has an increase, e.g., an increase of 1%, 5%, 10%, 20%, 30%, 40%, 50%, 60%, 70%, 80%, 90%, or more, in in vivo graft survival compared to a reference retroviral vector or VLP, e.g., an unmodified retroviral vector or VLP from a cell otherwise similar to the source cell.

[0448] In some embodiments, the retroviral vector or VLP has a reduction in immunogenicity as measured by a reduction in humoral response following one or more implantation of the retroviral vector or VLP into an appropriate animal model, e.g., an animal model described herein, compared to a humoral response following one or more implantation of a reference retroviral vector or VLP, e.g., an unmodified retroviral vector or VLP from a cell otherwise similar to the source cell, into an appropriate animal model, e.g., an animal model described herein. In some embodiments, the reduction in humoral response is measured in a serum sample by an anti-cell antibody titre, e.g., anti-retroviral or anti-VLP antibody titre, e.g., by ELISA. In some embodiments, the serum sample from animals administered the retroviral vector or VLP has a reduction of 1%, 5%, 10%, 20%, 30%, 40%, 50%, 60%, 70%, 80%, 90%, or more of an anti-retroviral or anti-VLP antibody titer compared to the serum sample from animals administered an unmodified retroviral vector or VLP. In some embodiments, the serum sample from animals administered the retroviral vector or VLP has an increased anti-retroviral or anti-VLP antibody titre, e.g., increased by 1%, 2%, 5%, 10%, 20%, 30%, or 40% from baseline, e.g., wherein baseline refers to serum sample from the same animals before administration of the retroviral vector or VLP.

[0449] In some embodiments, the retroviral vector or VLP has a reduction in macrophage phagocytosis, e.g., a reduction of 1%, 5%, 10%, 20%, 30%, 40%, 50%, 60%, 70%, 80%, 90%, or more in macrophage phagocytosis compared to a reference retroviral vector or VLP, e.g., an unmodified retroviral vector or VLP from a cell otherwise similar to the source cell, wherein the reduction in macrophage phagocytosis is determined by assaying the phagocytosis index in vitro, e.g., as described in Example 8. In some embodiments, the retroviral vector or VLP has a phagocytosis index of 0, 1, 10, 100, or more, e.g., as measured by an assay of Example 8, when incubated with macrophages in an in vitro assay of macrophage phagocytosis.

[0450] In some embodiments, the source cell or recipient cell has a reduction in cytotoxicity mediated cell lysis by PBMCs, e.g., a reduction of 1%, 5%, 10%, 20%, 30%, 40%, 50%, 60%, 70%, 80%, 90%, or more in cell lysis compared to a reference cell, e.g., an unmodified cell otherwise similar to the source cell, or a recipient cell that received an unmodified retroviral vector or VLP, or a mesenchymal stem cells, e.g., using an assay of Example 17. In embodiments, the source cell expresses exogenous HLA-G.

[0451] In some embodiments, the source cell or recipient cell has a reduction in NK-mediated cell lysis, e.g., a reduction of 1%, 5%, 10%, 20%, 30%, 40%, 50%, 60%, 70%, 80%, 90%, or more in NK-mediated cell lysis compared to a reference cell, e.g., an unmodified cell otherwise similar to the source cell, or a recipient cell that received an unmodified retroviral vector or VLP, wherein NK-mediated cell lysis is assayed in vitro, by a chromium release assay or europium release assay, e.g., using an assay of Example 18.

[0452] In some embodiments, the source cell or recipient cell has a reduction in CD8+ T-cell mediated cell lysis, e.g., a reduction of 1%, 5%, 10%, 20%, 30%, 40%, 50%, 60%, 70%, 80%, 90%, or more in CD8 T cell mediated cell lysis compared to a reference cell, e.g., an unmodified cell otherwise similar to the source cell, or a recipient cell that received an unmodified retroviral vector or VLP, wherein CD8 T cell mediated cell lysis is assayed in vitro, by an assay of Example 19.

[0453] In some embodiments, the source cell or recipient cell has a reduction in CD4+ T-cell proliferation and/or activation, e.g., a reduction of 1%, 5%, 10%, 20%, 30%, 40%, 50%, 60%, 70%, 80%, 90%, or more compared to a reference cell, e.g., an unmodified cell otherwise similar to the source cell, or a recipient cell that received an unmodified retroviral vector or VLP, wherein CD4 T cell proliferation is assayed in vitro (e.g. co-culture assay of modified or unmodified mammalian source cell, and CD4+ T-cells with CD3/CD28 Dynabeads).

[0454] In some embodiments, the retroviral vector or VLP causes a reduction in T-cell IFN-gamma secretion, e.g., a reduction of 1%, 5%, 10%, 20%, 30%, 40%, 50%, 60%, 70%, 80%, 90%, or more in T-cell IFN-gamma secretion compared to a reference retroviral vector or VLP, e.g., an unmodified retroviral vector or VLP from a cell otherwise similar to the source cell, wherein T-cell IFN-gamma secretion is assayed in vitro, e.g., by IFN-gamma ELISPOT.

[0455] In some embodiments, the retroviral vector or VLP causes a reduction in secretion of immunogenic cytokines, e.g., a reduction of 1%, 5%, 10%, 20%, 30%, 40%, 50%, 60%, 70%, 80%, 90%, or more in secretion of immunogenic cytokines compared to a reference retroviral vector or VLP, e.g., an unmodified retroviral vector or VLP from a cell otherwise similar to the source cell, wherein secretion of immunogenic cytokines is assayed in vitro using ELISA or ELISPOT.

[0456] In some embodiments, the retroviral vector or VLP results in increased secretion of an immunosuppressive cytokine, e.g., an increase of 1%, 5%, 10%, 20%, 30%, 40%, 50%, 60%, 70%, 80%, 90%, or more in secretion of an immunosuppressive cytokine compared to a reference retroviral vector or VLP, e.g., an unmodified retroviral vector or VLP from a cell otherwise similar to the source cell, wherein secretion of the immunosuppressive cytokine is assayed in vitro using ELISA or ELISPOT.

[0457] In some embodiments, the retroviral vector or VLP has an increase in expression of HLA-G or HLA-E, e.g., an increase in expression of 1%, 5%, 10%, 20%, 30%, 40%, 50%, 60%, 70%, 80%, 90%, or more of HLA-G or HLA-E, compared to a reference retroviral vector or VLP, e.g., an unmodified retroviral vector or VLP from a cell otherwise similar to the source cell, wherein expression of HLA-G or HLA-E is assayed in vitro using flow cytometry, e.g., FACS. In some embodiments, the retroviral vector or VLP is derived from a source cell which is modified to have an increased expression of HLA-G or HLA-E, e.g., compared to an unmodified cell, e.g., an increased expression of 1%, 5%, 10%, 20%, 30%, 40%, 50%, 60%, 70%, 80%, 90%, or more of HLA-G or HLA-E, wherein expression of HLA-G or HLA-E is assayed in vitro using flow cytometry, e.g., FACS. In some embodiments, the retroviral vector or VLP derived from a modified cell with increased HLA-G expression demonstrates reduced immunogenicity.

[0458] In some embodiments, the retroviral vector or VLP has or causes an increase in expression of T cell inhibitor ligands (e.g. CTLA4, PD1, PD-L1), e.g., an increase in expression of 1%, 5%, 10%, 20%, 30%, 40%, 50%, 60%, 70%, 80%, 90%, or more of T cell inhibitor ligands as compared to a reference retroviral vector or VLP, e.g., an unmodified retroviral vector or VLP from a cell otherwise similar to the source cell, wherein expression of T cell inhibitor ligands is assayed in vitro using flow cytometry, e.g., FACS.

[0459] In some embodiments, the retroviral vector or VLP has a decrease in expression of co-stimulatory ligands, e.g., a decrease of 1%, 5%, 10%, 20%, 30%, 40%, 50%, 60%, 70%, 80%, 90%, or more in expression of co-stimulatory ligands compared to a reference retroviral vector or VLP, e.g., an unmodified retroviral vector or VLP from a cell otherwise similar to the source cell, wherein expression of co-stimulatory ligands is assayed in vitro using flow cytometry, e.g., FACS.

[0460] In some embodiments, the retroviral vector or VLP has a decrease in expression of MHC class I or MHC class II, e.g., a decrease in expression of 1%, 5%, 10%, 20%, 30%, 40%, 50%, 60%, 70%, 80%, 90%, or more of MHC Class I or MHC Class II compared to a reference retroviral vector or VLP, e.g., an unmodified retroviral vector or VLP from a cell otherwise similar to the source cell or a HeLa cell, wherein expression of MHC Class I or II is assayed in vitro using flow cytometry, e.g., FACS.

[0461] In some embodiments, the retroviral vector or VLP is derived from a cell source, e.g., a mammalian cell source, which is substantially non-immunogenic. In some embodiments, immunogenicity can be quantified, e.g., as described herein. In some embodiments, the mammalian cell source comprises any one, all or a combination of the following features:
[0462] a. wherein the source cell is obtained from an autologous cell source; e.g., a cell obtained from a recipient who will be receiving, e.g., administered, the retroviral vector or VLP;
[0463] b. wherein the source cell is obtained from an allogeneic cell source which is of matched, e.g., similar, gender to a recipient, e.g., a recipient described herein who will be receiving, e.g., administered; the retroviral vector or VLP;
[0464] c. wherein the source cell is obtained is from an allogeneic cell source is which is HLA matched with a recipient's HLA, e.g., at one or more alleles;
[0465] d. wherein the source cell is obtained is from an allogeneic cell source which is an HLA homozygote;
[0466] e. wherein the source cell is obtained is from an allogeneic cell source which lacks (or has reduced levels compared to a reference cell) MHC class I and II; or
[0467] f. wherein the source cell is obtained is from a cell source which is known to be substantially non-immunogenic including but not limited to a stem cell, a mesenchymal stem cell, an induced pluripotent stem cell, an embryonic stem cell, a sertoli cell, or a retinal pigment epithelial cell.

[0468] In some embodiments, the subject to be administered the retroviral vector or VLP has, or is known to have, or is tested for, a pre-existing antibody (e.g., IgG or IgM) reactive with a retroviral vector or VLP. In some embodiments, the subject to be administered the retroviral vector or VLP does not have detectable levels of a pre-existing antibody reactive with the retroviral vector or VLP. Tests for the antibody are described, e.g., in Example 13.

[0469] In some embodiments, a subject that has received the retroviral vector or VLP has, or is known to have, or is tested for, an antibody (e.g., IgG or IgM) reactive with a retroviral vector or VLP. In some embodiments, the subject that received the retroviral vector or VLP (e.g., at least once, twice, three times, four times, five times, or more) does not have detectable levels of antibody reactive with the retroviral vector or VLP. In embodiments, levels of antibody do not rise more than 1%, 2%, 5%, 10%, 20%, or 50% between two timepoints, the first timepoint being before the first administration of the retroviral vector or VLP, and the second timepoint being after one or more administrations of the retroviral vector or VLP. Tests for the antibody are described, e.g., in Example 14.

### Exogenous Agents

[0470] In some embodiments, a retroviral vector, VLP, or pharmaceutical composition described herein encodes an exogenous agent.

### Exogenous Protein Agents

[0471] In some embodiments, the exogenous agent comprises a cytosolic protein, e.g., a protein that is produced in the recipient cell and localizes to the recipient cell cytoplasm. In some embodiments, the exogenous agent comprises a secreted protein, e.g., a protein that is produced and secreted by the recipient cell. In some embodiments, the exogenous agent comprises a nuclear protein, e.g., a protein that is produced in the recipient cell and is imported to the nucleus of the recipient cell. In some embodiments, the exogenous agent comprises an organellar protein (e.g., a mitochondrial protein), e.g., a protein that is produced in the recipient cell and is imported into an organelle (e.g., a mitochondrial) of the recipient cell.

[0472] In some embodiments, the exogenous agent comprises a nucleic acid, e.g., RNA, intron(s), exon(s), mRNA (messenger RNA), tRNA (transfer RNA), modified RNA, microRNA, siRNA (small interfering RNA), tmRNA (transfer messenger RNA), rRNA (ribosomal RNA), mtRNA (mitochondrial RNA), snRNA (small nuclear RNA), small nucleolar RNA (snoRNA), SmY RNA (mRNA trans-splicing RNA), gRNA (guide RNA), TERC (telomerase RNA component), aRNA (antisense RNA), cis-NAT (Cis-natural antisense transcript), CRISPR RNA (crRNA), IncRNA (long noncoding RNA), piRNA (piwi-interacting RNA), shRNA (short hairpin RNA), tasiRNA (trans-acting siRNA), eRNA (enhancer RNA), satellite RNA, pcRNA (protein coding RNA), dsRNA (double stranded RNA), RNAi (interfering RNA), circRNA (circular RNA), reprogramming RNAs, aptamers, and any combination thereof. In some embodiments, the nucleic acid is a wild-type nucleic acid or a mutant nucleic acid. In some embodiments the nucleic acid is a fusion or chimera of multiple nucleic acid sequences.

[0473] In some embodiments, the exogenous agent comprises a polypeptide, e.g., enzymes, structural polypeptides, signaling polypeptides, regulatory polypeptides, transport polypeptides, sensory polypeptides, motor polypeptides, defense polypeptides, storage polypeptides, transcription factors, antibodies, cytokines, hormones, catabolic polypeptides, anabolic polypeptides, proteolytic polypeptides, metabolic polypeptides, kinases, transferases, hydrolases, lyases, isomerases, ligases, enzyme modulator polypeptides, protein binding polypeptides, lipid binding polypeptides, membrane fusion polypeptides, cell differentiation polypeptides, epigenetic polypeptides, cell death polypeptides, nuclear transport polypeptides, nucleic acid binding polypeptides, reprogramming polypeptides, DNA editing polypeptides, DNA repair polypeptides, DNA recombination polypeptides, transposase polypeptides, DNA integration polypeptides, targeted endonucleases (e.g. Zinc-finger nucleases, transcription-activator-like nucleases (TALENs), cas9 and homologs thereof), recombinases, and any combination thereof. In some embodiments the protein targets a protein in the cell for degradation. In some embodiments the protein targets a protein in the cell for degradation by localizing the protein to the proteasome. In some embodiments, the protein is a wild-type protein or a mutant protein. In some embodiments the protein is a fusion or chimeric protein.

### Membrane Proteins

[0474] In some embodiments, the exogenous agent comprises a membrane protein. In some embodiments, the membrane protein comprises a chimeric antigen receptor (CAR), a T cell receptor, an integrin, an ion channel, a pore forming protein, a Toll-Like Receptor, an interleukin receptor, a cell adhesion protein, or a transport protein.

[0475] In some embodiments, the membrane protein comprises a sequence of SEQ ID NOs: 8144-16131 of U.S. Patent Publication No. 2016/0289674, which are herein incorporated by reference in their entireties. In some embodiments, the membrane protein comprises a fragment, variant, or homolog of a sequence of SEQ ID NOs: 8144-16131 of U.S. Patent Publication No. 2016/0289674. In some embodiments, the membrane protein comprises a nucleic acid encoding a protein comprising a sequence of SEQ ID NOs: 8144-16131 of U.S. Patent Publication No. 2016/0289674. In some embodiments, the membrane protein comprises a nucleic acid encoding a protein comprising a fragment, variant, or homolog of a sequence of SEQ ID NOs: 8144-16131 of U.S. Patent Publication No. 2016/0289674.

[0476] In some embodiments, the membrane protein comprises a chimeric antigen receptor (CAR) comprising an antigen binding domain. In some embodiments, the CAR is or comprises a first generation CAR comprising an antigen binding domain, a transmembrane domain, and signaling domain (e.g., one, two or three signaling domains). In some embodiments, the CAR comprises a third generation CAR comprising an antigen binding domain, a transmembrane domain, and at least three signaling domains. In some embodiments, a fourth generation CAR comprising an antigen binding domain, a transmembrane domain, three or four signaling domains, and a domain which upon successful signaling of the CAR induces expression of a cytokine gene. In some embodiments, the antigen binding domain is or comprises an scFv or Fab.

[0477] In some embodiments, the antigen binding domain targets an antigen characteristic of a neoplastic cell. In some embodiments, the antigen characteristic of a neoplastic cell is selected from a cell surface receptor, an ion channel-linked receptor, an enzyme-linked receptor, a G protein-coupled receptor, receptor tyrosine kinase, tyrosine kinase associated receptor, receptor-like tyrosine phosphatase, receptor serine/threonine kinase, receptor guanylyl cyclase, histidine kinase associated receptor, Epidermal Growth Factor Receptors (EGFR) (including ErbB1/EGFR, ErbB2/HER2, ErbB3/HER3, and ErbB4/HER4), Fibroblast Growth Factor Receptors (FGFR) (including FGF1, FGF2, FGF3, FGF4, FGF5, FGF6, FGF7, FGF18, and FGF21) Vascular Endothelial Growth Factor Receptors (VEGFR) (including VEGF-A, VEGF-B, VEGF-C, VEGF-D, and PIGF), RET Receptor and the Eph Receptor Family (including EphAl, EphA2, EphA3, EphA4, EphA5, EphA6, EphA7, EphA8, EphA9, EphA10, EphB1, EphB2. EphB3, EphB4, and EphB6), CXCR1, CXCR2, CXCR3, CXCR4, CXCR6, CCR1, CCR2, CCR3, CCR4, CCR5, CCR6, CCR8, CFTR, CIC-1, CIC-2, CIC-4, CIC-5, CIC-7, CIC-Ka, CIC-Kb, Bestrophins, TMEM16A, GABA receptor, glycin receptor, ABC transporters, NAV1.1, NAV1.2, NAV1.3, NAV1.4, NAV1.5, NAV1.6, NAV1.7, NAV1.8, NAV1.9, sphingosin-1-phosphate receptor (SlPlR), NMDA channel, transmembrane protein, multispan transmembrane protein, T-cell receptor motifs; T-cell alpha chains; T-cell Rchains; T-cell γ chains; T-cell 6 chains; CCR7; CD3; CD4; CD5; CD7; CD8; CD11b; CD11c; CD16; CD19; CD20; CD21; CD22; CD25; CD28; CD34; CD35; CD40; CD45RA; CD45RO; CD52; CD56; CD62L; CD68; CD80; CD95; CD117; CD127; CD133; CD137 (4-1 BB); CD163; F4/80; IL-4Ra; Sca-1; CTLA-4; GITR; GARP; LAP; granzyme B; LFA-1; transferrin receptor; NKp46, perforin, CD4+; Thl; Th2; Thl7; Th40; Th22; Th9; Tfh, Canonical Treg. FoxP3+; Trl; Th3; Treg17; TREG; CDCP1, NT5E, EpCAM, CEA, gpA33, Mucins, TAG-72, Carbonic anhydrase IX, PSMA, Folate binding protein, Gangliosides (e.g., CD2, CD3, GM2), Lewis-72, VEGF, VEGFR 1/2/3, αVβ3, α5β1, ErbB1/EGFR, ErbB1/HER2, ErB3, c-MET, IGF1R, EphA3, TRAIL-R1, TRAIL-R2, RANKL, FAP, Tenascin, PDL-1, BAFF, HDAC, ABL, FLT3, KIT, MET, RET, IL-10, ALK, RANKL, mTOR, CTLA-4, IL-6, IL-6R, JAK3, BRAF, PTCH, Smoothened, PIGF, ANPEP, TIMP1, PLAUR, PTPRJ, LTBR, or ANTXR1, Folate receptor alpha (FRa), ERBB2 (Her2/neu), EphA2, IL-13Ra2, epidermal growth factor receptor (EGFR), Mesothelin, TSHR, CD19, CD123, CD22, CD30, CD171, CS-1, CLL-1, CD33, EGFRvIII, GD2, GD3, BCMA, MUC16 (CA125), LCAM, LeY, MSLN, IL13R□1, L1-CAM, Tn Ag, prostate specific membrane antigen (PSMA), ROR1, FLT3, FAP, TAG72, CD38, CD44v6, CEA, EPCAM, B7H3, KIT, interleukin-11 receptor a (IL-iRa), PSCA, PRSS21, VEGFR2, LewisY, CD24, platelet-derived growth factor receptor-beta (PDGFR-beta), SSEA-4, CD20, MUC1, NCAM, Prostase, PAP, ELF2M, Ephrin B2, IGF-1 receptor, CAIX, LMP2, gplOO, bcr-abl, tyrosinase, Fucosyl GM1, sLe, GM3, TGS5, HMWMAA, o-acetyl-GD2, Folate receptor beta, TEM1/CD248, TEM7R, CLDN6, GPRC5D, CXORF61, CD97, CD179a, ALK, Polysialic acid, PLACl, GloboH, NY-BR-1, UPK2, HAVCRi, ADRB3, PANX3, GPR20, LY6K, OR51E2, TARP, WT1, NY-ESO-1, LAGE-la, MAGE-A1, legumain, HPV E6, E7, ETV6-AML, sperm protein 17, XAGE1, Tie 2, MAD-CT-1, MAD-CT-2, Fos-related antigen 1, p53, p⁵³ mutant, prostein, survivin, telomerase, PCTA-1/Galectin 8, MelanA/MART1, Ras mutant, hTERT, sarcoma translocation breakpoints, ML-IAP, ERG (TMPRSS2 ETS fusion gene), NA17, PAX3, Androgen receptor, Cyclin Bi, MYCN, RhoC, TRP-2, CYPIB I, BORIS, SART3, PAX5, OY-TES1, LCK, AKAP-4, SSX2, RAGE-1, human telomerase reverse transcriptase, RUi, RU2, intestinal carboxyl esterase, mut hsp70-2, CD79a, CD79b, CD72, LAIR1, FCAR, LILRA2, CD300LF, CLECi2A, BST2, EMR2, LY75, GPC3, FCRL5, IGLL, a neoantigen, CD133, CD15, CD184, CD24, CD56, CD26, CD29, CD44, HLA-A, HLA-B, HLA-C, (HLA-A,B,C) CD49f, CD151 CD340, CD200, tkrA, trkB, or trkC, or an antigenic fragment or antigenic portion thereof.

[0478] In some embodiments, the CAR transmembrane domain comprises at least a transmembrane region of the alpha, beta or zeta chain of a T-cell receptor, CD28, CD3 epsilon, CD45, CD4, CD5, CD8, CD9, CD16, CD22, CD33, CD37, CD64, CD80, CD86, CD134, CD137, CD154, or functional variant thereof. In some embodiments, the transmembrane domain comprises at least a transmembrane region(s) of CD8a, CD80, 4-1BB/CD137, CD28, CD34, CD4, FcεRIγ, CD16, OX40/CD134, CD3ζ, CD3F, CD37, CD36, TCRα, TCRβ, TCRζ, CD32, CD64, CD64, CD45, CD5, CD9, CD22, CD37, CD80, CD86, CD40, CD40L/CD154, VEGFR2, FAS, and FGFR2B, or functional variant thereof.

[0479] In some embodiments, the CAR comprises at least one signaling domain selected from one or more of B7-1/CD80; B7-2/CD86; B7-H1/PD-L1; B7-H2; B7-H3; B7-H4; B7-H6; B7-H7; BTLA/CD272; CD28; CTLA-4; Gi24/VISTA/B7-H5; ICOS/CD278; PD-1; PD-L2/B7-DC; PDCD6); 4-1BB/TNFSF9/CD137; 4-1BB Ligand/TNFSF9; BAFF/BLyS/TNFSF13B; BAFF R/TNFRSF13C; CD27/TNFRSF7; CD27 Ligand/TNFSF7; CD30/TNFRSF8; CD30 Ligand/TNFSF8; CD40/TNFRSF5; CD40/TNFSF5; CD40 Ligand/TNFSF5; DR3/TNFRSF25; GITR/TNFRSF18; GITR Ligand/TNFSF18; HVEM/TNFRSF14; LIGHT/TNFSF14; Lymphotoxin-alpha/TNF-beta; OX40/TNFRSF4; OX40 Ligand/TNFSF4; RELT/TNFRSF19L; TACI/TNFRSF13B; TL1A/TNFSF15; TNF-alpha; TNF RII/TNFRSF1B); 2B4/CD244/SLAMF4; BLAME/SLAMF8; CD2; CD2F-10/SLAMF9; CD48/SLAMF2; CD58/LFA-3; CD84/SLAMF5; CD229/SLAMF3; CRACC/SLAMF7; NTB-A/SLAMF6; SLAM/CD150); CD2; CD7; CD53; CD82/Kai-1; CD90/Thy1; CD96; CD160; CD200; CD300a/LMIR1; HLA Class I; HLA-DR; Ikaros; Integrin alpha 4/CD49d; Integrin alpha 4 beta 1; Integrin alpha 4 beta 7/LPAM-1; LAG-3; TCL1A; TCLB; CRTAM; DAP12; Dectin-1/CLEC7A; DPPIV/CD26; EphB6; TIM-1/KIM-1/HAVCR; TIM-4; TSLP; TSLP R; lymphocyte function associated antigen-1 (LFA-1); NKG2C, a CD3 zeta domain, an immunoreceptor tyrosine-based activation motif (ITAM), CD27, CD28, 4-1BB, CD134/OX40, CD30, CD40, PD-1, ICOS, lymphocyte function-associated antigen-1 (LFA-1), CD2, CD7, LIGHT, NKG2C, B7-H3, a ligand that specifically binds with CD83, or functional fragment thereof.

miRNA and siRNA

[0480] In embodiments, the retroviral genome encodes one or more (e.g. two or more) inhibitory RNA molecules directed against one or more RNA targets. An inhibitory RNA molecule can be, e.g., a miRNA or an shRNA. In some embodiments, the inhibitory molecule can be a precursor of a miRNA, such as for example, a Pri-miRNA or a Pre-miRNA, or a precursor of an shRNA. In some embodiments, the inhibitory molecule can be an artificially derived miRNA or shRNA. In other embodiments, the inhibitory RNA molecule can be a dsRNA (either transcribed or artificially introduced) that is processed into an siRNA or the siRNA itself. In some embodiments, the inhibitory RNA molecule can be a miRNA or shRNA that has a sequence that is not found in nature, or has at least one functional segment that is not found in nature, or has a combination of functional segments that are not found in nature. In illustrative embodiments, at least one or all of the inhibitory RNA molecules are miR-155.

[0481] In some embodiments, a retroviral vector described herein encodes two or more inhibitory RNA molecules directed against one or more RNA targets. Two or more inhibitory RNA molecules, in some embodiments, can be directed against different targets. In other embodiments, the two or more inhibitory RNA molecules are directed against the same target.

[0482] In some embodiments, the exogenous agent comprises a shRNA. A shRNA (short hairpin RNA) can comprise a double-stranded structure that is formed by a single self-complementary RNA strand. shRNA constructs can comprise a nucleotide sequence identical to a portion, of either coding or non-coding sequence, of a target gene. RNA sequences with insertions, deletions, and single point mutations relative to the target sequence can also be used. Greater than 90% sequence identity, or even 100% sequence identity, between the inhibitory RNA and the portion of the target gene can be used. In certain embodiments, the length of the duplex-forming portion of an shRNA is at least 20, 21 or 22 nucleotides in length, e.g., corresponding in size to RNA products produced by Dicer-dependent cleavage. In certain embodiments, the shRNA construct is at least 25, 50, 100, 200, 300 or 400 bases in length. In certain embodiments, the shRNA construct is 400-800 bases in length. shRNA constructs are highly tolerant of variation in loop sequence and loop size.

[0483] In embodiments, a retroviral vector that encodes an siRNA, an miRNA, an shRNA, or a ribozyme comprises one or more regulatory sequences, such as, for example, a strong constitutive pol III, e.g., human U6 snRNA promoter, the mouse U6 snRNA promoter, the human and mouse H1 RNA promoter and the human tRNA-val promoter, or a strong constitutive pol II promoter.

### Fusogen Receptors and Methods of Preventing Source Cell Fusion

[0484] In some embodiments, a source cell is modified (e.g., using siRNA, miRNA, shRNA, genome editing, or other methods) to have reduced expression (e.g., no expression) of a fusogen receptor that binds a fusogen expressed by the source cell. In some embodiments, the fusogen is a re-targeted fusogen, e.g., the fusogen may comprise a target-binding domain, e.g., an antibody, e.g., an scFv. In some embodiments, the fusogen receptor is bound by the antibody.

### Insulator Elements

[0485] In some embodiments, a retroviral or lentiviral vector or VLP further comprises one or more insulator elements, e.g., an insulator element described herein. Insulators elements may contribute to protecting lentivirus-expressed sequences, e.g., therapeutic polypeptides, from integration site effects, which may be mediated by cis-acting elements present in genomic DNA and lead to deregulated expression of transferred sequences (e.g., position effect; see, e.g., Burgess-Beusse et al, 2002, Proc. Natl. Acad. Sci., USA, 99: 16433; and Zhan et al, 2001, Hum. Genet., 109:471) or deregulated expression of endogenous sequences adjacent to the transferred sequences. In some embodiments, transfer vectors comprise one or more insulator element the 3′ LTR and upon integration of the provirus into the host genome, the provirus comprises the one or more insulators at the 5′ LTR and/or 3′ LTR, by virtue of duplicating the 3′ LTR. Suitable insulators include, but are not limited to, the chicken β-globin insulator (see Chung et al, 1993. Cell 74:505; Chung et al, 1997. N4S 94:575; and Bell et al., 1999. Cell 98:387, incorporated by reference herein) or an insulator from a human β-globin locus, such as chicken HS4. In some embodiments the insulator binds CCCTC binding factor (CTCF). In some embodiments the insulator is a barrier insulator. In some embodiments the insulator is an enhancer-blocking insulator. See, e.g., Emery et al., Human Gene Therapy, 2011, and in Browning and Trobridge, Biomedicines, 2016, both of which are included in their entirety by reference.

[0486] In some embodiments, insulators in the retroviral nucleic acid reduce genotoxicity in recipient cells. Genotoxicity can be measured, e.g., as described in Cesana et al, “Uncovering and dissecting the genotoxicity of self-inactivating lentiviral vectors in vivo” Mol Ther. 2014 April; 22(4):774-85. doi: 10.1038/mt.2014.3. Epub 2014 Jan. 20.

Pharmaceutical Compositions and Methods of Making them

[0487] In some embodiments, one or more transducing units of retroviral vector are administered to the subject. In some embodiments, at least 1, 10, 100, 1000, 10⁴, 10⁵, 10⁶, 10⁷, 10⁸, 10⁹, 10¹⁰, 10¹¹, 10¹², 10¹³, or 10¹⁴, transducing units per kg are administered to the subject. In some embodiments at least 1, 10, 100, 1000, 10⁴, 10⁵, 10⁶, 10⁷, 10⁸, 10⁹,10¹⁰, 10¹¹, 10¹², 10, or 10¹⁴, transducing units per target cell per ml of blood are administered to the subject.

### Concentration and Purification of Lentivirus

[0488] In some embodiments, a retroviral vector formulation described herein can be produced by a process comprising one or more of, e.g., all of, the following steps (i) to (vi), e.g., in chronological order:
[0489] (i) culturing cells that produce retroviral vector;
[0490] (ii) harvesting the retroviral vector containing supernatant;
[0491] (iii) optionally clarifying the supernatant;
[0492] (iv) purifying the retroviral vector to give a retroviral vector preparation;
[0493] (v) optionally filter-sterilization of the retroviral vector preparation; and
[0494] (vi) concentrating the retroviral vector preparation to produce the final bulk product.

[0495] In some embodiments the process does not comprise the clarifying step (iii). In other embodiments the process does include the clarifying step (iii). In some embodiments, step (vi) is performed using ultrafiltration, or tangential flow filtration, more preferably hollow fiber ultrafiltration. In some embodiments, the purification method in step (iv) is ion exchange chromatography, more preferably anion exchange chromatography. In some embodiments, the filter-sterilisation in step (v) is performed using a 0.22 m or a 0.2 m sterilising filter. In some embodiments, step (iii) is performed by filter clarification. In some embodiments, step (iv) is performed using a method or a combination of methods selected from chromatography, ultrafiltration/diafiltration, or centrifugation. In some embodiments, the chromatography method or a combination of methods is selected from ion exchange chromatography, hydrophobic interaction chromatography, size exclusion chromatography, affinity chromatography, reversed phase chromatography, and immobilized metal ion affinity chromatography. In some embodiments, the centrifugation method is selected from zonal centrifugation, isopycnic centrifugation and pelleting centrifugation. In some embodiments, the ultrafiltration/diafiltration method is selected from tangential flow diafiltration, stirred cell diafiltration and dialysis. In some embodiments, at least one step is included into the process to degrade nucleic acid to improve purification. In some embodiments, said step is nuclease treatment.

[0496] In some embodiments, concentration of the vectors is done before filtration. In some embodiments, concentration of the vectors is done after filtration. In some embodiments, concentration and filtrations steps are repeated.

[0497] In some embodiments, the final concentration step is performed after the filter-sterilisation step. In some embodiments, the process is a large scale-process for producing clinical grade formulations that are suitable for administration to humans as therapeutics. In some embodiments, the filter-sterilisation step occurs prior to a concentration step. In some embodiments, the concentration step is the final step in the process and the filter-sterilisation step is the penultimate step in the process. In some embodiments, the concentration step is performed using ultrafiltration, preferably tangential flow filtration, more preferably hollow fiber ultrafiltration. In some embodiments, the filter-sterilisation step is performed using a sterilising filter with a maximum pore size of about 0.22 μm. In another preferred embodiment the maximum pore size is 0.2 μm

[0498] In some embodiments, the vector concentration is less than or equal to about 4.6×10¹¹ RNA genome copies per ml of preparation prior to filter-sterilisation. The appropriate concentration level can be achieved through controlling the vector concentration using, e.g. a dilution step, if appropriate. Thus, in some embodiments, a retroviral vector preparation is diluted prior to filter sterilisation.

[0499] Clarification may be done by a filtration step, removing cell debris and other impurities. Suitable filters may utilize cellulose filters, regenerated cellulose fibers, cellulose fibers combined with inorganic filter aids (e.g. diatomaceous earth, perlite, fumed silica), cellulose filters combined with inorganic filter aids and organic resins, or any combination thereof, and polymeric filters (examples include but are not limited to nylon, polypropylene, polyethersulfone) to achieve effective removal and acceptable recoveries. A multiple stage process may be used. An exemplary two or three-stage process would consist of a coarse filter(s) to remove large precipitate and cell debris followed by polishing second stage filter(s) with nominal pore sizes greater than 0.2 micron but less than 1 micron. The optimal combination may be a function of the precipitate size distribution as well as other variables. In addition, single stage operations employing a relatively small pore size filter or centrifugation may also be used for clarification. More generally, any clarification approach including but not limited to dead-end filtration, microfiltration, centrifugation, or body feed of filter aids (e.g. diatomaceous earth) in combination with dead-end or depth filtration, which provides a filtrate of suitable clarity to not foul the membrane and/or resins in the subsequent steps, will be acceptable to use in the clarification step of the present invention.

[0500] In some embodiments, depth filtration and membrane filtration is used. Commercially available products useful in this regard are for instance mentioned in WO 03/097797, p. 20-21. Membranes that can be used may be composed of different materials, may differ in pore size, and may be used in combinations. They can be commercially obtained from several vendors. In some embodiments, the filter used for clarification is in the range of 1.2 to 0.22 μm. In some embodiments, the filter used for clarification is either a 1.2/0.45 μm filter or an asymmetric filter with a minimum nominal pore size of 0.22 μm

[0501] In some embodiments, the method employs nuclease to degrade contaminating DNA/RNA, i.e. mostly host cell nucleic acids. Exemplary nucleases suitable for use in the present invention include Benzonase® Nuclease (EP 0229866) which attacks and degrades all forms of DNA and RNA (single stranded, double stranded linear or circular) or any other DNase and/or RNase commonly used within the art for the purpose of eliminating unwanted or contaminating DNA and/or RNA from a preparation. In preferred embodiments, the nuclease is Benzonase® Nuclease, which rapidly hydrolyzes nucleic acids by hydrolyzing internal phosphodiester bonds between specific nucleotides, thereby reducing the size of the polynucleotides in the vector containing supernatant. Benzonase® Nuclease can be commercially obtained from Merck KGaA (code W214950). The concentration in which the nuclease is employed is preferably within the range of 1-100 units/ml.

[0502] In some embodiments, the vector suspension is subjected to ultrafiltration (sometimes referred to as diafiltration when used for buffer exchange) at least once during the process, e.g. for concentrating the vector and/or buffer exchange. The process used to concentrate the vector can include any filtration process (e.g., ultrafiltration (UF)) where the concentration of vector is increased by forcing diluent to be passed through a filter in such a manner that the diluent is removed from the vector preparation whereas the vector is unable to pass through the filter and thereby remains, in concentrated form, in the vector preparation. UF is described in detail in, e.g., Microfiltration and Ultrafiltration: Principles and Applications, L. Zeman and A. Zydney (Marcel Dekker, Inc., New York, N.Y., 1996); and in: Ultrafiltration Handbook, Munir Cheryan (Technomic Publishing, 1986; ISBN No. 87762-456-9). A suitable filtration process is Tangential Flow Filtration (“TFF”) as described in, e.g., MILLIPORE catalogue entitled “Pharmaceutical Process Filtration Catalogue” pp. 177-202 (Bedford, Mass., 1995/96). TFF is widely used in the bioprocessing industry for cell harvesting, clarification, purification and concentration of products including viruses. The system is composed of three distinct process streams: the feed solution, the permeate and the retentate. Depending on application, filters with different pore sizes may be used. In some embodiments, the retentate contains the product (lentiviral vector).The particular ultrafiltration membrane selected may have a pore size sufficiently small to retain vector but large enough to effectively clear impurities. Depending on the manufacturer and membrane type, for retroviral vectors nominal molecular weight cutoffs (NMWC) between 100 and 1000 kDa may be appropriate, for instance membranes with 300 kDa or 500 kDa NMWC. The membrane composition may be, but is not limited to, regenerated cellulose, polyethersulfone, polysulfone, or derivatives thereof. The membranes can be flat sheets (also called flat screens) or hollow fibers. A suitable UF is hollow fibre UF, e.g., filtration using filters with a pore size of smaller than 0.1 m. Products are generally retained, while volume can be reduced through permeation (or be kept constant during diafiltration by adding buffer with the same speed as the speed with which the permeate, containing buffer and impurities, is removed at the permeate side).

[0503] The two most widely used geometries for TFF in the biopharmaceutical industry are plate & frame (flat screens) and hollow fiber modules. Hollow fiber units for ultrafiltration and microfiltration were developed by Amicon and Ramicon in the early 1970s (Cheryan, M. Ultrafiltration Handbook), even though now there are multiple vendors including Spectrum and GE Healthcare. The hollow fiber modules consist of an array of self-supporting fibers with a dense skin layer. Fiber diameters range from 0.5 mm-3 mm. In certain embodiments, hollow fibers are used for TFF. In certain embodiments, hollow fibers of 500 kDa (0.05 m) pore size are used. Ultrafiltration may comprise diafiltration (DF). Microsolutes can be removed by adding solvent to the solution being ultrafiltered at a rate equal to the UF rate. This washes microspecies from the solution at a constant volume, purifying the retained vector.

[0504] UF/DF can be used to concentrate and/or buffer exchange the vector suspensions in different stages of the purification process. The method can utilize a DF step to exchange the buffer of the supernatant after chromatography or other purification steps, but may also be used prior to chromatography.

[0505] In some embodiments, the eluate from the chromatography step is concentrated and further purified by ultrafiltration-diafiltration. During this process the vector is exchanged into formulation buffer. Concentration to the final desired concentration can take place after the filter-sterilisation step. After said sterile filtration, the filter sterilised substance is concentrated by aseptic UF to produce the bulk vector product.

[0506] In embodiments, the ultrafiltration/diafiltration may be tangential flow diafiltration, stirred cell diafiltration and dialysis.

[0507] Purification techniques tend to involve the separation of the vector particles from the cellular milieu and, if necessary, the further purification of the vector particles. One or more of a variety of chromatographic methods may be used for this purification. Ion exchange, and more particularly anion exchange, chromatography is a suitable method, and other methods could be used. A description of some chromatographic techniques is given below.

[0508] Ion-exchange chromatography utilises the fact that charged species, such as biomolecules and viral vectors, can bind reversibly to a stationary phase (such as a membrane, or else the packing in a column) that has, fixed on its surface, groups that have an opposite charge. There are two types of ion exchangers. Anion exchangers are stationary phases that bear groups having a positive charge and hence can bind species with a negative charge. Cation exchangers bear groups with a negative charge and hence can bind species with positive charge. The pH of the medium has an influence on this, as it can alter the charge on a species. Thus, for a species such as a protein, if the pH is above the pI, the net charge will be negative, whereas below the pI, the net charge will be positive.

[0509] Displacement (elution) of the bound species can be effected by the use of suitable buffers. Thus commonly the ionic concentration of the buffer is increased until the species is displaced through competition of buffer ions for the ionic sites on the stationary phase. An alternative method of elution entails changing the pH of the buffer until the net charge of the species no longer favours biding to the stationary phase. An example would be reducing the pH until the species assumes a net positive charge and will no longer bind to an anion exchanger.

[0510] Some purification can be achieved if impurities are uncharged, or else if they bear a charge of opposite sign to that of the desired species, but the same sign to that on the ion exchanger. This is because uncharged species and those having a charge of the same sign to that an ion exchanger, will not normally bind. For different bound species, the strength of the binding varies with factors such as the charge density and the distribution of charges on the various species. Thus by applying an ionic or pH gradient (as a continuous gradient, or as a series of steps), the desired species might be eluted separately from impurities.

[0511] Size exclusion chromatography is a technique that separates species according to their size. Typically it is performed by the use of a column packed with particles having pores of a well-defined size. For the chromatographic separation, particles are chosen that have pore sizes that are appropriate with regard to the sizes of the species in the mixture to be separated. When the mixture is applied, as a solution (or suspension, in the case of a virus), to the column and then eluted with buffer, the largest particles will elute first as they have limited (or no) access to the pores. Smaller particles will elute later as they can enter the pores and hence take a longer path through the column. Thus in considering the use of size exclusion chromatography for the purification of viral vectors, it would be expected that the vector would be eluted before smaller impurities such as proteins.

[0512] Species, such as proteins, have on their surfaces, hydrophobic regions that can bind reversibly to weakly hydrophobic sites on a stationary phase. In media having a relatively high salt concentration, this binding is promoted. Typically in HIC the sample to be purified is bound to the stationary phase in a high salt environment. Elution is then achieved by the application of a gradient (continuous, or as a series of steps) of decreasing salt concentration. A salt that is commonly used is ammonium sulphate. Species having differing levels of hydrophobicity will tend to be eluted at different salt concentrations and so the target species can be purified from impurities. Other factors, such as pH, temperature and additives to the elution medium such as detergents, chaotropic salts and organics can also influence the strength of binding of species to HIC stationary phases. One, or more, of these factors can be adjusted or utilised to optimise the elution and purification of product.

[0513] Viral vectors have on their surface, hydrophobic moieties such as proteins, and thus HIC could potentially be employed as a means of purification.

[0514] Like HIC, RPC separates species according to differences in their hydrophobicities. A stationary phase of higher hydrophobicity than that employed in HIC is used. The stationary phase often consists of a material, typically silica, to which are bound hydrophobic moieties such as alkyl groups or phenyl groups. Alternatively the stationary phase might be an organic polymer, with no attached groups. The sample-containing the mixture of species to be resolved is applied to the stationary phase in an aqueous medium of relatively high polarity which promotes binding. Elution is then achieved by reducing the polarity of the aqueous medium by the addition of an organic solvent such as isopropanol or acetonitrile. Commonly a gradient (continuous, or as a series of steps) of increasing organic solvent concentration is used and the species are eluted in order of their respective hydrophobicities.

[0515] Other factors, such as the pH of the elution medium, and the use of additives, can also influence the strength of binding of species to RPC stationary phases. One, or more, of these factors can be adjusted or utilised to optimise the elution and purification of product. A common additive is trifluororacetic acid (TFA). This suppresses the ionisation of acidic groups such as carboxyl moieties in the sample. It also reduces the pH in the eluting medium and this suppresses the ionisation of free silanol groups that may be present on the surface of stationary phases having a silica matrix. TFA is one of a class of additives known as ion pairing agents. These interact with ionic groups, present on species in the sample, that bear an opposite charge. The interaction tends to mask the charge, increasing the hydrophobicity of the species. Anionic ion pairing agents, such as TFA and pentafluoropropionic acid interact with positively charged groups on a species. Cationic ion pairing agents such, as triethylamine, interact with negatively charged groups.

[0516] Viral vectors have on their surface, hydrophobic moieties such as proteins, and thus RPC, potentially, could be employed as a means of purification.

[0517] Affinity chromatography utilises the fact that certain ligands that bind specifically with biomolecules such as proteins or nucleotides, can be immobilised on a stationary phase. The modified stationary phase can then be used to separate the relevant biomolecule from a mixture. Examples of highly specific ligands are antibodies, for the purification of target antigens and enzyme inhibitors for the purification of enzymes. More general interactions can also be utilised such as the use of the protein A ligand for the isolation of a wide range of antibodies.

[0518] Typically, affinity chromatography is performed by application of a mixture, containing the species of interest, to the stationary phase that has the relevant ligand attached. Under appropriate conditions this will lead to the binding of the species to the stationary phase. Unbound components are then washed away before an eluting medium is applied. The eluting medium is chosen to disrupt the binding of the ligand to the target species. This is commonly achieved by choice of an appropriate ionic strength, pH or by the use of substances that will compete with the target species for ligand sites. For some bound species, a chaotropic agent such as urea is used to effect displacement from the ligand. This, however, can result in irreversible denaturation of the species.

[0519] Viral vectors have on their surface, moieties such as proteins, that might be capable of binding specifically to appropriate ligands. This means that, potentially, affinity chromatography could be used in their isolation.

[0520] Biomolecules, such as proteins, can have on their surface, electron donating moieties that can form coordinate bonds with metal ions. This can facilitate their binding to stationary phases carrying immobilised metal ions such as Ni²⁺, Cu²⁺, Zn²⁺ or Fe³⁺. The stationary phases used in IMAC have chelating agents, typically nitriloacetic acid or iminodiacetic acid covalently attached to their surface and it is the chelating agent that holds the metal ion. It is necessary for the chelated metal ion to have at least one coordination site left available to form a coordinate bond to a biomolecule. Potentially there are several moieties on the surface of biomolecules that might be capable of bonding to the immobilised metal ion. These include histidine, tryptophan and cysteine residues as well as phosphate groups. For proteins, however, the predominant donor appears to be the imidazole group of the histidine residue. Native proteins can be separated using IMAC if they exhibit suitable donor moieties on their surface. Otherwise IMAC can be used for the separation of recombinant proteins bearing a chain of several linked histidine residues.

[0521] Typically, IMAC is performed by application of a mixture, containing the species of interest, to the stationary phase. Under appropriate conditions this will lead to the coordinate bonding of the species to the stationary phase. Unbound components are then washed away before an eluting medium is applied. For elution, gradients (continuous, or as a series of steps) of increasing salt concentration or decreasing pH may be used. Also a commonly used procedure is the application of a gradient of increasing imidazole concentration. Biomolecules having different donor properties, for example having histidine residues in differing environments, can be separated by the use of gradient elution.

[0522] Viral vectors have on their surface, moieties such as proteins, that might be capable of binding to IMAC stationary phases. This means that, potentially, IMAC could be used in their isolation.

[0523] Suitable centrifugation techniques include zonal centrifugation, isopycnic ultra and pelleting centrifugation.

[0524] Filter-sterilisation is suitable for processes for pharmaceutical grade materials. Filter-sterilisation renders the resulting formulation substantially free of contaminants. The level of contaminants following filter-sterilisation is such that the formulation is suitable for clinical use. Further concentration (e.g. by ultrafiltration) following the filter-sterilisation step may be performed in aseptic conditions. In some embodiments, the sterilising filter has a maximum pore size of 0.22 m.

[0525] The retroviral vectors herein can also be subjected to methods to concentrate and purify a lentiviral vector using flow-through ultracentrifugation and high-speed centrifugation, and tangential flow filtration. Flow through ultracentrifugation can be used for the purification of RNA tumor viruses (Toplin et al, Applied Microbiology 15:582-589, 1967; Burger et al., Journal of the National Cancer Institute 45: 499-503, 1970). Flow-through ultracentrifugation can be used for the purification of Lentiviral vectors. This method can comprise one or more of the following steps. For example, a lentiviral vector can be produced from cells using a cell factory or bioreactor system. A transient transfection system can be used or packaging or producer cell lines can also similarly be used. A pre-clarification step prior to loading the material into the ultracentrifuge could be used if desired. Flow-through ultracentrifugation can be performed using continuous flow or batch sedimentation. The materials used for sedimentation are, e.g.: Cesium chloride, potassium tartrate and potassium bromide, which create high densities with low viscosity although they are all corrosive. CsCl is frequently used for process development as a high degree of purity can be achieved due to the wide density gradient that can be created (1.0 to 1.9 g/cm³). Potassium bromide can be used at high densities, e.g., at elevated temperatures, such as 25° C., which may be incompatible with stability of some proteins. Sucrose is widely used due to being inexpensive, non-toxic and can form a gradient suitable for separation of most proteins, sub-cellular fractions and whole cells. Typically the maximum density is about 1.3 g/cm³. The osmotic potential of sucrose can be toxic to cells in which case a complex gradient material can be used, e.g. Nycodenz. A gradient can be used with 1 or more steps in the gradient. An embodiment is to use a step sucrose gradient. The volume of material can be from 0.5 liters to over 200 liters per run. The flow rate speed can be from 5 to over 25 liters per hour. A suitable operating speed is between 25,000 and 40,500 rpm producing a force of up to 122,000×g. The rotor can be unloaded statically in desired volume fractions. An embodiment is to unload the centrifuged material in 100 ml fractions. The isolated fraction containing the purified and concentrated Lentiviral vector can then be exchanged in a desired buffer using gel filtration or size exclusion chromatography. Anionic or cationic exchange chromatography could also be used as an alternate or additional method for buffer exchange or further purification. In addition, Tangential Flow Filtration can also be used for buffer exchange and final formulation if required. Tangential Flow Filtration (TFF) can also be used as an alternative step to ultra or high speed centrifugation, where a two step TFF procedure would be implemented. The first step would reduce the volume of the vector supernatant, while the second step would be used for buffer exchange, final formulation and some further concentration of the material. The TFF membrane can have a membrane size of between 100 and 500 kilodaltons, where the first TFF step can have a membrane size of 500 kilodaltons, while the second TFF can have a membrane size of between 300 to 500 kilodaltons. The final buffer should contain materials that allow the vector to be stored for long term storage.

[0526] In embodiments, the method uses either cell factories that contains adherent cells, or a bioreactor that contains suspension cells that are either transfected or transduced with the vector and helper constructs to produce lentiviral vector. Non limiting examples or bioreactors, include the Wave bioreactor system and the Xcellerex bioreactors. Both are disposable systems. However non-disposable systems can also be used. The constructs can be those described herein, as well as other lentiviral transduction vectors. Alternatively the cell line can be engineered to produce Lentiviral vector without the need for transduction or transfection. After transfection, the lentiviral vector can be harvested and filtered to remove particulates and then is centrifuged using continuous flow high speed or ultra centrifugation. A preferred embodiment is to use a high speed continuous flow device like the JCF-A zonal and continuous flow rotor with a high speed centrifuge. Also preferably is the use of Contifuge Stratus centrifuge for medium scale Lentiviral vector production. Also suitable is any continuous flow centrifuge where the speed of centrifugation is greater than 5,000×g RCF and less than 26,000×g RCF. Preferably, the continuous flow centrifugal force is about 10,500×g to 23,500×g RCF with a spin time of between 20 hours and 4 hours, with longer centrifugal times being used with slower centrifugal force. The lentiviral vector can be centrifuged on a cushion of more dense material (a non limiting example is sucrose but other reagents can be used to form the cushion and these are well known in the art) so that the Lentiviral vector does not form aggregates that are not filterable, as sometimes occurs with straight centrifugation of the vector that results in a viral vector pellet. Continuous flow centrifugation onto a cushion allows the vector to avoid large aggregate formation, yet allows the vector to be concentrated to high levels from large volumes of transfected material that produces the Lentiviral vector. In addition, a second less-dense layer of sucrose can be used to band the Lentiviral vector preparation. The flow rate for the continuous flow centrifuge can be between 1 and 100 ml per minute, but higher and lower flow rates can also be used. The flow rate is adjusted to provide ample time for the vector to enter the core of the centrifuge without significant amounts of vector being lost due to the high flow rate. If a higher flow rate is desired, then the material flowing out of the continuous flow centrifuge can be re-circulated and passed through the centrifuge a second time. After the virus is concentrated using continuous flow centrifugation, the vector can be further concentrated using Tangential Flow Filtration (TFF), or the TFF system can be simply used for buffer exchange. A non-limiting example of a TFF system is the Xampler cartridge system that is produced by GB-Healthcare. Preferred cartridges are those with a MW cut-off of 500,000 MW or less. Preferably a cartridge is used with a MW cut-off of 300,000 MW. A cartridge of 100,000 MW cut-off can also be used. For larger volumes, larger cartridges can be used and it will be easy for those in the art to find the right TFF system for this final buffer exchange and/or concentration step prior to final fill of the vector preparation. The final fill preparation may contain factors that stabilize the vector sugars are generally used and are known in the art.

[0527] Protein Content

[0528] In some embodiments the retroviral particle includes various source cell genome-derived proteins, exogenous proteins, and viral-genome derived proteins. In some embodiments the retroviral particle contains various ratios of source cell genome-derived proteins to viral-genome-derived proteins, source cell genome-derived proteins to exogenous proteins, and exogenous proteins to viral-genome derived proteins.

[0529] In some embodiments, the viral-genome derived proteins are GAG polyprotein precursor, HIV-1 Integrase, POL polyprotein precursor, Capsid, Nucleocapsid, p17 matrix, p6, p2, VPR, Vif.

[0530] In some embodiments, the source cell-derived proteins are Cyclophilin A, Heat Shock 70 kD, Human Elongation Factor-1 Alpha (EF-1R), Histones H1, H2A, H3, H4, beta-globin, Trypsin Precursor, Parvulin, Glyceraldehyde-3-phosphate dehydrogenase, Lck, Ubiquitin, SUMO-1, CD48, Syntenin-1, Nucleophosmin, Heterogeneous nuclear ribonucleoproteins C1/C2, Nucleolin, Probable ATP-dependent helicase DDX48, Matrin-3, Transitional ER ATPase, GTP-binding nuclear protein Ran, Heterogeneous nuclear ribonucleoprotein U, Interleukin enhancer binding factor 2, Non-POU domain containing octamer binding protein, RuvB like 2, HSP 90-b, HSP 90-a, Elongation factor 2, D-3-phosphoglycerate dehydrogenase, α-enolase, C-1-tetrahydrofolate synthase, cytoplasmic, Pyruvate kinase, isozymes M1/M2, Ubiquitin activating enzyme E1, 26S protease regulatory subunit S10B, 60S acidic ribosomal protein P2, 60S acidic ribosomal protein PO, 40S ribosomal protein SA, 40S ribosomal protein S2, 40S ribosomal protein S3, 60S ribosomal protein L4, 60S ribosomal protein L3, 40S ribosomal protein S3a, 40S ribosomal protein S7, 60S ribosomal protein L7a, 60S acidic ribosomal protein L31, 60S ribosomal protein L10a, 60S ribosomal protein L6, 26S proteasome non-ATPase regulatory subunit 1, Tubulin b-2 chain, Actin, cytoplasmic 1, Actin, aortic smooth muscle, Tubulin α-ubiquitous chain, Clathrin heavy chain 1, Histone H2B.b, Histone H4, Histone H3.1, Histone H3.3, Histone H2A type 8, 26S protease regulatory subunit 6A, Ubiquitin-4, RuvB like 1, 26S protease regulatory subunit 7, Leucyl-tRNA synthetase, cytoplasmic, 60S ribosomal protein L19, 26S proteasome non-ATPase regulatory subunit 13, Histone H2B.F, U5 small nuclear ribonucleoprotein 200 kDa helicase, Poly[ADP-ribose]polymerase-1, ATP-dependent DNA helicase II, DNA replication licensing factor MCM5, Nuclease sensitive element binding protein 1, ATP-dependent RNA helicase A, Interleukin enhancer binding factor 3, Transcription elongation factor B polypeptide 1, Pre-mRNA processing splicing factor 8, Staphylococcal nuclease domain containing protein 1, Programmed cell death 6-interacting protein, Mediator of RNA polymerase II transcription subunit 8 homolog, Nucleolar RNA helicase II, Endoplasmin, DnaJ homolog subfamily A member 1, Heat shock 70 kDa protein 1L, T-complex protein 1 e subunit, GCN1-like protein 1, Serotransferrin, Fructose bisphosphate aldolase A, Inosine-5′monophosphate dehydrogenase 2, 26S protease regulatory subunit 6B, Fatty acid synthase, DNA-dependent protein kinase catalytic subunit, 40S ribosomal protein S17, 60S ribosomal protein L7, 60S ribosomal protein L12, 60S ribosomal protein L9, 40S ribosomal protein S8, 40S ribosomal protein S4 X isoform, 60S ribosomal protein L11, 26S proteasome non-ATPase regulatory subunit 2, Coatomer a subunit, Histone H2A.z, Histone H1.2, Dynein heavy chain cytosolic. See: Saphire et al., Journal of Proteome Research, 2005, and Wheeler et al., Proteomics Clinical Applications, 2007.

[0531] In some embodiments the retroviral vector is pegylated.

### Particle Size

[0532] In some embodiments the median retroviral vector diameter is between 10 and 1000 nM, 25 and 500 nm 40 and 300 nm, 50 and 250 nm, 60 and 225 nm, 70 and 200 nm, 80 and 175 nm, or 90 and 150 nm.

[0533] In some embodiments, 90% of the retroviral vectors fall within 50% of the median diameter of the retrovirus. In some embodiments, 90% of the retroviral vectors fall within 25% of the median diameter of the retrovirus. In some embodiments, 90% of the retroviral vectors fall within 20% of the median diameter of the retrovirus. In some embodiments, 90% of the retroviral vectors fall within 15% of the median diameter of the retrovirus. In some embodiments, 90% of the retroviral vectors fall within 10% of the median diameter of the retrovirus.

### Indications and Uses

[0534] In some embodiments, the fusosome, e.g. retroviral vectors or particles, or pharmaceutical compositions thereof as described herein can be administered to a subject, e.g. a mammal, e.g. a human. In some aspects, provided herein are retroviral vectors, VLPs, or pharmaceutical compositions, such as any as described herein, that can be administered to a subject, e.g., a mammal, e.g., a human. In such embodiments, the subject may be at risk of, may have a symptom of, or may be diagnosed with or identified as having, a particular disease or condition (e.g., a disease or condition described herein). In one embodiment, the subject has cancer. In one embodiment, the subject has an infectious disease. In some embodiments, the fusosome, e.g. retroviral vectors or particles, contains nucleic acid sequences encoding an exogenous agent for treating the disease or condition in the subject. For example, the exogenous agent is one that targets or is specific for a protein of a neoplastic cells and the fusosome is administered to a subject for treating a tumor or cancer in the subject. In another example, the exogenous agent is an inflammatory mediator or immune molecule, such as a cytokine, and the fusosome is administered to a subject for treating any condition in which it is desired to modulate (e.g. increase) the immune response, such as a cancer or infectious disease.

[0535] Thus, also provided, in some aspects, are methods of administering and uses, such as therapeutic and prophylactic uses, of the provided fusosomes, e.g., retroviral vectors and particles, such as lentiviral vectors and particles, and/or compositions comprising the same. Such methods and uses include therapeutic methods and uses, for example, involving administration of the fusosomes, e.g., retroviral vectors or particles, such as lentiviral vectors or particles, or compositions containing the same, to a subject having a disease, condition, or disorder for delivery of an exogenous agent for treatment of the disease, condition or disorder. In some embodiments, the fusosome (e.g., retroviral vector or particle, such as lentiviral vector or particle) is administered in an effective amount or dose to effect treatment of the disease, condition or disorder. Provided herein are uses of any of the provided fusosomes (e.g. retroviral vector or particle, such as lentiviral vector or particle) in such methods and treatments, and in the preparation of a medicament in order to carry out such therapeutic methods. In some embodiments, the methods are carried out by administering the fusosomes (e.g. retroviral vector or particle, such as lentiviral vector or particle), or compositions comprising the same, to the subject having, having had, or suspected of having the disease or condition or disorder. In some embodiments, the methods thereby treat the disease or condition or disorder in the subject. Also provided herein are use of any of the compositions, such as pharmaceutical compositions provided herein, for the treatment of a disease, condition or disorder associated with a particular gene or protein targeted by or provided by the exogenous agent.

[0536] Cancers include, for example, leukemias, lymphomas (Hodgkin's and non-Hodgkin's), myelomas and myeloproliferative disorders; sarcomas, melanomas, adenomas, carcinomas of solid tissue, squamous cell carcinomas of the mouth, throat, larynx, and lung, liver cancer, genitourinary cancers such as prostate, cervical, bladder, uterine, and endometrial cancer and renal cell carcinomas, bone cancer, pancreatic cancer, skin cancer, cutaneous or intraocular melanoma, cancer of the endocrine system, cancer of the thyroid gland, cancer of the parathyroid gland, head and neck cancers, breast cancer, gastro-intestinal cancers and nervous system cancers, benign lesions such as papillomas, and the like.

[0537] Target cells from mammalian (e.g., human) tissue include cells from epithelial, connective, muscular, or nervous tissue or cells, and combinations thereof. Target mammalian (e.g., human) cells and organ systems include the cardiovascular system (heart, vasculature); digestive system (esophagus, stomach, liver, gallbladder, pancreas, intestines, colon, rectum and anus); endocrine system (hypothalamus, pituitary gland, pineal body or pineal gland, thyroid, parathyroids, adrenal glands); excretory system (kidneys, ureters, bladder); lymphatic system (lymph, lymph nodes, lymph vessels, tonsils, adenoids, thymus, spleen); integumentary system (skin, hair, nails); muscular system (e.g., skeletal muscle); nervous system (brain, spinal cord, nerves)’; reproductive system (ovaries, uterus, mammary glands, testes, vas deferens, seminal vesicles, prostate); respiratory system (pharynx, larynx, trachea, bronchi, lungs, diaphragm); skeletal system (bone, cartilage), and combinations thereof. In some embodiments, a non-target cells or organ system is chosen from the cardiovascular system (heart, vasculature); digestive system (esophagus, stomach, liver, gallbladder, pancreas, intestines, colon, rectum and anus); endocrine system (hypothalamus, pituitary gland, pineal body or pineal gland, thyroid, parathyroids, adrenal glands); excretory system (kidneys, ureters, bladder); lymphatic system (lymph, lymph nodes, lymph vessels, tonsils, adenoids, thymus, spleen); integumentary system (skin, hair, nails); muscular system (e.g., skeletal muscle); nervous system (brain, spinal cord, nerves)’; reproductive system (ovaries, uterus, mammary glands, testes, vas deferens, seminal vesicles, prostate); respiratory system (pharynx, larynx, trachea, bronchi, lungs, diaphragm); skeletal system (bone, cartilage), and combinations thereof.

[0538] The administration of a pharmaceutical composition described herein may be, for example, by way of oral, inhaled, transdermal or parenteral (including intravenous, intratumoral, intraperitoneal, intramuscular, intracavity, and subcutaneous) administration. The fusosomes may, in some embodiments, be administered alone or formulated as a pharmaceutical composition.

[0539] In embodiments, the fusosome composition mediates an effect on a target cell, and the effect lasts for at least 1, 2, 3, 4, 5, 6, or 7 days, 2, 3, or 4 weeks, or 1, 2, 3, 6, or 12 months. In some embodiments (e.g., wherein the fusosome composition comprises an exogenous protein), the effect lasts for less than 1, 2, 3, 4, 5, 6, or 7 days, 2, 3, or 4 weeks, or 1, 2, 3, 6, or 12 months.

[0540] In embodiments, the fusosome composition described herein is delivered ex-vivo to a cell or tissue, e.g., a human cell or tissue.

[0541] The fusosome compositions described herein can, in some embodiments, be administered to a subject, e.g., a mammal, e.g., a human. In certain embodiments, the subject may be at risk of, may have a symptom of, or may be diagnosed with or identified as having, a particular disease or condition (e.g., a disease or condition described herein).

[0542] In some embodiments, the source of fusosomes are from the same subject that is administered a fusosome composition. In other embodiments, they are different. For example, the source of fusosomes and recipient tissue may be autologous (from the same subject) or heterologous (from different subjects). In either case, the donor tissue for fusosome compositions described herein may be a different tissue type than the recipient tissue. For example, the donor tissue may be muscular tissue and the recipient tissue may be connective tissue (e.g., adipose tissue). In other embodiments, the donor tissue and recipient tissue may be of the same or different type, but from different organ systems.

[0543] In some embodiments, the fusosome is co-administered with an inhibitor of a protein that inhibits membrane fusion. For example, Suppressyn is a human protein that inhibits cell-cell fusion (Sugimoto et al., “A novel human endogenous retroviral protein inhibits cell-cell fusion” Scientific Reports 3:1462 DOI: 10.1038/srep01462). Thus, in some embodiments, the fusosome is co-administered with an inhibitor of sypressyn, e.g., a siRNA or inhibitory antibody.

[0544] Compositions described herein may, in some embodiments, be used to similarly modulate the cell or tissue function or physiology of a variety of other organisms, including but not limited to: farm or working animals (horses, cows, pigs, chickens etc.), pet or zoo animals (cats, dogs, lizards, birds, lions, tigers and bears etc.), aquaculture animals (fish, crabs, shrimp, oysters etc.), plants species (trees, crops, ornamentals flowers etc), fermentation species (saccharomyces etc.). Fusosome compositions described herein can be made, in some embodiments, from such non-human sources and administered to a non-human target cell or tissue or subject.

[0545] Fusosome compositions can be autologous, allogeneic or xenogeneic to the target.

### Additional Therapeutic Agents

[0546] In some embodiments, the fusosome composition is co-administered with an additional agent, e.g., a therapeutic agent, to a subject, e.g., a recipient, e.g., a recipient described herein. In some embodiments, the co-administered therapeutic agent is an immunosuppressive agent, e.g., a glucocorticoid (e.g., dexamethasone), cytostatic (e.g., methotrexate), antibody (e.g., Muromonab-CD3), or immunophilin modulator (e.g., Ciclosporin or rapamycin). In embodiments, the immunosuppressive agent decreases immune mediated clearance of fusosomes. In some embodiments the fusosome composition is co-administered with an immunostimulatory agent, e.g., an adjuvant, an interleukin, a cytokine, or a chemokine.

[0547] In some embodiments, the fusosome composition and the immunosuppressive agent are administered at the same time, e.g., contemporaneously administered. In some embodiments, the fusosome composition is administered before administration of the immunosuppressive agent. In some embodiments, the fusosome composition is administered after administration of the immunosuppressive agent.

[0548] In some embodiments, the immunosuppressive agent is a small molecule such as ibuprofen, acetaminophen, cyclosporine, tacrolimus, rapamycin, mycophenolate, cyclophosphamide, glucocorticoids, sirolimus, azathriopine, or methotrexate.

[0549] In some embodiments, the immunosuppressive agent is an antibody molecule, including but not limited to: muronomab (anti-CD3), Daclizumab (anti-IL12), Basiliximab, Infliximab (Anti-TNFa), or rituximab (Anti-CD20).

[0550] In some embodiments, co-administration of the fusosome composition with the immunosuppressive agent results in enhanced persistence of the fusosome composition in the subject compared to administration of the fusosome composition alone. In some embodiments, the enhanced persistence of the fusosome composition in the co-administration is at least 10%, 20%, 30%, 40%, 50%, 60%, 70%, 80%, 90% or longer, compared to persistence of the fusosome composition when administered alone. In some embodiments, the enhanced persistence of the fusosome composition in the co-administration is at least 1, 2, 3, 4, 5, 6, 7, 10, 15, 20, 25, or 30 days or longer, compared to survival of the fusosome composition when administered alone.

### EXAMPLES

[0551] The Examples below are set forth to aid in the understanding of the inventions, but are not intended to, and should not be construed to, limit its scope in any way.

### Example 1. Assaying Off-Target Cells to Detect Specificity of Retroviral Nucleic Acid Delivery

[0552] This Example describes quantification of a nucleic acid in off-target recipient cells by measuring vector copy number in single cells.

[0553] In an embodiment, treated mice have a similar vector copy number in off-target cells as those from untreated mice, e.g., no vector or a vector number similar to negative control levels. In an embodiment, treated mice have a similar percent of off-target cells that contain the vector as those from untreated mice, e.g., no cells or a cell number similar to negative control levels.

[0554] In this example, the off-target recipient cell is a CD11c+ cell. However, this protocol may be adapted to any cell type for which suitable surface markers exist and which can be isolated from the subject. Notably, the methods described herein may be equally applicable to humans, rats, monkeys with optimization to the protocol.

[0555] Mice are treated with retroviral vector produced as described herein or with PBS (negative control). 28 days following treatment, peripheral blood is collected from mice that received retroviral vector and mice that received PBS treatment. Blood is collected into 1 ml PBS containing 5 μM EDTA and mixed immediately to prevent clotting. The tubes are kept on ice and red blood cells are removed using a buffered ammonium chloride (ACK) solution. Cells are stained with a murine CD11c:APC-Cy7 antibody (Biolegend Catalog #: 117323) or an isotype control APC-Cy7 antibody (Biolegend Catalog #: 400230) at 4° C. for 30 minutes in the dark, after being Fc blocked (Biolegend Catalog #: 101319) in cell staining buffer (Biolegend Catalog #: 420201) for 10 minutes. After being washed two times with PBS, cells are analyzed on a FACS Aria (BD Biosciences, San Jose, Calif.) with 640 nm laser excitation and emission collected at 780−/+60 nm running the FACSDiva™ software (BD Biosciences, San Jose, Calif.) to set negative gates using the isotype control APC-Cy7 antibody labeled cells. APC-Cy7 positive cells are sorted into single wells of plate for vector copy number analysis.

[0556] Vector copy number is assessed using single-cell nested PCR. PCR is performed with qPCR using primers and probes specific to the vector and an endogenous control gene. Vector copy number is determined by dividing the amount of vector qPCR signal by the amount of the endogenous control gene qPCR signal. A cell that received the vector will have a vector copy number of at least 1.0. Vector copy number is assessed across the population by averaging the vector copy number of the plurality of cells

[0557] In some embodiments, mice treated with retroviral vectors have a similar average vector copy number in off-target cells as those from mice treated with vehicle. In some embodiments, mice treated with treated with retroviral vectors have a similar percent of off-target cells that received the vector as those from mice treated with vehicle.

### Example 2. Assaying Off-Target Cells to Detect Specificity of Delivery of an Exogenous Protein Agent

[0558] This Example describes quantification of the expression of an exogenous agent in off-target recipient cells by exogenous agent expression in single cells.

[0559] In an embodiment, treated mice have similar exogenous agent expression in off-target cells as those from untreated mice. In an embodiment, treated mice have a similar percent of off-target cells that express the exogenous agent as those from untreated mice.

[0560] In this example, the off-target recipient cell is a CD11c+ cell. However, this protocol may be adapted to any cell type for which suitable surface markers exist and which can be isolated from the subject. Notably, the methods described herein may be equally applicable to humans, rats, monkeys with optimization to the protocol. In this example the exogenous agent is a fluorescent protein and expression is measured via flow cytometry. In other embodiments, the expression of an exogenous protein agent may be measured with immunostaining for the protein. In other embodiments expression of the exogenous protein agent may be measured via microscopy or western blot.

[0561] Mice are treated with retroviral vector with a tdtomato fluorescent protein agent produced via any of the methods described in this application or with PBS (negative control). 28 days following treatment, peripheral blood is collected from mice that received retroviral vector and mice that received PBS treatment. Blood is collected into 1 ml PBS containing 5 μM EDTA and mixed immediately to prevent clotting. The tubes are kept on ice and red blood cells are removed using a buffered ammonium chloride (ACK) solution. Cells are stained with a murine CD11c:APC-Cy7 antibody (Biolgend Catalog #: 117323) or isotype controls APC-Cy7 antibody (Biolegend Catalog #: 400230) at 4° C. for 30 minutes in the dark, after being Fc blocked (Biolegend Catalog #: 101319) in cell staining buffer (Biolegend Catalog #: 420201) for 10 minutes. After being washed two times with PBS, cells are analyzed on a FACS Aria (BD Biosciences, San Jose, Calif.) running the FACSDiva™ software (BD Biosciences, San Jose, Calif.). A negative gate for CD11c is set using the isotype control APC-Cy7 antibody labeled cells and with a 640 nm laser excitation and emission collected at 780−/+60. A negative gate for tdtomato expression is set with cells isolated from mice treated with vehicle and with a 552 nm laser excitation and an emission collected at 585−/+42 nm.

[0562] The percent of CD11c+ cells that are tdtomato positive is measured. In some embodiments, the percent of CD11c+ cells that are tdtomato positive is similar in cells from treated and untreated mice. The median tdtomato fluorescence level is measured in CD11c+ cells. In some embodiments, the median tdtomato fluorescence level in CD11c+ cells is similar in cells from treated and untreated mice.

### Example 3. Assaying Target Cells to Detect Specificity of Retroviral Nucleic Acid Delivery

[0563] This Example describes quantification of a nucleic acid in target recipient cells by measuring vector copy number in single cells.

[0564] In an embodiment, treated mice have a greater vector copy number in target cells than those from untreated mice. In an embodiment, treated mice have a greater percent of target cells that contain the vector than those from untreated mice.

[0565] In this example, the target recipient cell is a CD3+ cell. However, this protocol may be adapted to any cell type for which suitable surface markers exist and which can be isolated from the subject. Notably, the methods described herein may be equally applicable to humans, rats, monkeys with optimization to the protocol.

[0566] Mice are treated with retroviral vector and a blood sample is collected as described above in Example 1. Cells are stained with a murine CD3:APC-Cy7 antibody (Biolegend Catalog #: 100330) or an isotype control using the protocol described above in Example 1. Vector copy number is assessed using single-cell nested PCR as described in Example 1.

[0567] In some embodiments, mice treated with retroviral vectors have a greater average vector copy number in target cells than those from mice treated with vehicle. In some embodiments, mice treated with treated with retroviral vectors have a greater percent of target cells that received the vector than those from mice treated with vehicle.

### Example 4. Assaying Target Cells to Detect Specificity of Delivery of an Exogenous Protein Agent

[0568] This Example describes quantification of the expression of an exogenous protein agent in target recipient cells by exogenous protein agent expression in single cells.

[0569] In an embodiment, treated mice have greater exogenous protein agent expression in target cells than those from untreated mice. In an embodiment, treated mice have a greater percent of target cells that express the exogenous protein agent than those from untreated mice.

[0570] In this example, the target recipient cell is a CD3+ cell. However, this protocol may be adapted to any cell type for which suitable surface markers exist and which can be isolated from the subject. Notably, the methods described herein may be equally applicable to humans, rats, monkeys with optimization to the protocol. In this example the exogenous protein agent is a fluorescent protein and expression is measured via flow cytometry. In other embodiments, the expression of an exogenous protein agent may be measured with immunostaining for the protein. In other embodiments expression of the exogenous protein agent may be measured via microscopy or western blot.

[0571] Mice are treated with retroviral vector and a blood sample is collected as described above in Example 2. Cells are stained with a murine CD3:APC-Cy7 antibody (Biolegend Catalog #: 100330) or isotype controls and analyzed by flow cytometry using the protocol described in Example 2.

[0572] The percent of CD3+ cells that are tdtomato positive is measured. In some embodiments, the percent of CD3+ cells that are tdtomato positive is greater in cells from treated than untreated mice. The median tdtomato fluorescence level is measured in CD3+ cells. In some embodiments, the median tdtomato fluorescence level in CD3+ cells is greater in cells from treated than untreated mice.

### Example 5. Modification of Retroviral Vector with HLA-G or HLA-E for Decreased Cytotoxicity Mediated by PBMC Cell Lysis

[0573] This Example describes retroviral vectors derived from cells modified to have decreased cytotoxicity due to cell lysis by peripheral blood mononuclear cells (PBMCs).

[0574] In an embodiment, cytotoxicity mediated cell lysis of retroviral vectors by PBMCs is a measure of immunogenicity of retroviral vectors, as lysis will reduce, e.g., inhibit or stop, the activity of a retroviral vector.

[0575] Retroviral vectors are created from: unmodified cells (hereinafter NMCs, positive control), cells that are transfected with HLA-G or HLA-E cDNA (hereinafter NMC-HLA-G), and cells transfected with an empty vector control (hereinafter NMC-empty vector, negative control).

[0576] PBMC mediated lysis of a retroviral vector is determined by europium release assays as described in Bouma, et al. Hum. Immunol. 35(2):85-92; 1992 & van Besouw et al. Transplantation 70(1):136-143; 2000. PBMCs (hereinafter effector cells) are isolated from an appropriate donor, and stimulated with allogeneic gamma irradiated PMBCs and 200 IU/mL IL-2 (proleukin, Chiron BV Amsterdam, The Netherlands) in a round bottom 96 well plate for 7 days at 37° C. The retroviral vectors are labeled with europium-diethylenetriaminepentaacetate (DTPA) (sigma, St. Louis, Mo., USA).

[0577] At day 7 cytotoxicity-mediated lysis assays is performed by incubating ⁶³Eu-labelled retroviral vector with effector cells in a 96-well plate for 1, 2, 3, 4, 5, 6, 8, 10, 15, 20, 24, or 48 hours after plating at effector/target ratios ranging from 1000:1-1:1 and 1:1.25-1:1000. After incubation, the plates are centrifuged and a sample of the supernatant is transferred to 96-well plates with low background fluorescence (fluoroimmunoplates, Nunc, Roskilde, Denmark).

[0578] Subsequently, enhancement solution (PerkinElmer, Groningen, The Netherlands) is added to each well. The released europium is measured in a time-resolved fluorometer (Victor 1420 multilabel counter, LKB-Wallac, Finland). Fluorescence is expressed in counts per second (CPS). Maximum percent release of europium by a target retroviral vector is determined by incubating an appropriate number (1×10²-1×10⁸) of retroviral vectors with 1% triton (sigma-aldrich) for an appropriate amount of time. Spontaneous release of europium by target retroviral vector is measured by incubation of labeled target retroviral vector without effector cells. Percentage leakage is then calculated as: (spontaneous release/maximum release)×100%. The percentage of cytotoxicity mediated lysis is calculated as % lysis=[(measured lysis-spontaneous lysis-spontaneous release)/(maximum release-spontaneous release)]×100%. The data is analyzed by looking at the percentage of lysis as a function of different effector target ratios.

[0579] In an embodiment, retroviral vectors generated from NMC-HLA-G cells will have a decreased percentage of lysis by target cells at specific timepoints as compared to retroviral vectors generated from NMCs or NMC-empty vector.

### Example 6. Modification of Retroviral Vector with HLA-G or HLA-E for Decreased NK Lysis Activity

[0580] This Example describes the generation of a retroviral vector composition derived from a cell source which has been modified to decrease cytotoxicity mediated cell lysis by NK cells. In an embodiment cytotoxicity mediated cell lysis of retroviral vectors by NK cells is a measure of immunogenicity for retroviral vectors.

[0581] Retroviral vectors are created from: unmodified cells (hereinafter NMCs, positive control), cells that are transfected with HLA-G or HLA-E cDNA (hereinafter NMC-HLA-G), and cells transfected with an empty vector control (hereinafter NMC-empty vector, negative control).

[0582] NK cell mediated lysis of a retroviral vector is determined by europium release assays as described in Bouma, et al. Hum. Immunol. 35(2):85-92; 1992 & van Besouw et al. Transplantation 70(1):136-143; 2000. NK cells (hereinafter effector cells) are isolated from an appropriate donor according to the methods in Crop et al. Cell transplantation (20):1547-1559; 2011, and stimulated with allogeneic gamma irradiated PMBCs and 200 IU/mL IL-2 (proleukin, Chiron BV Amsterdam, The Netherlands) in a round bottom 96 well plate for 7 days at 37° C. The retroviral vectors are labeled with europium-diethylenetriaminepentaacetate (DTPA) (sigma, St. Louis, Mo., USA). Cytotoxicity-mediated lysis assays and data analysis are performed as described above in Example 5.

[0583] In an embodiment, retroviral vectors generated from NMC-HLA-G cells will have a decreased percentage of lysis by target cells at specific timepoints as compared to retroviral vectors generated from NMCs or NMC-empty vector.

### Example 7. Modification of Retroviral Vector with HLA-G or HLA-E for Decreased CD8 Killer T Cell Lysis

[0584] This Example describes the generation of a retroviral vector composition derived from a cell source which has been modified to decrease cytotoxicity mediated cell lysis by CD8+ T-cells. In an embodiment, cytotoxicity mediated cell lysis of retroviral vector by CD8+ T-cells is a measure of immunogenicity for retroviral vectors.

[0585] Retroviral vectors are created from: unmodified cells (hereinafter NMCs, positive control), cells that are transfected with HLA-G or HLA-E cDNA (hereinafter NMC-HLA-G), and cells transfected with an empty vector control (hereinafter NMC-empty vector, negative control).

[0586] CD8+ T cell mediated lysis of a retroviral vector is determined by europium release assays as described in Bouma, et al. Hum. Immunol. 35(2):85-92; 1992 & van Besouw et al. Transplantation 70(1):136-143; 2000. CD8+ T-cells (hereinafter effector cells) are isolated from an appropriate donor according to the methods in Crop et al. Cell transplantation (20):1547-1559; 2011, and stimulated with allogeneic gamma irradiated PMBCs and 200 IU/mL IL-2 (proleukin, Chiron BV Amsterdam, The Netherlands) in a round bottom 96 well plate for 7 days at 37° C. The retroviral vectors are labeled with europium-diethylenetriaminepentaacetate (DTPA) (sigma, St. Louis, Mo., USA). Cytotoxicity-mediated lysis assays and data analysis are performed as described above in Example 5.

[0587] In an embodiment, retroviral vectors generated from NMC-HLA-G cells will have a decreased percentage of lysis by target cells at specific timepoints as compared to retroviral vectors generated from NMCs or NMC-empty vector.

### Example 8: Modification of Retroviral Vector with CD47 to Evade Macrophage Phagocytosis

[0588] This Example describes quantification of the evasion of phagocytosis by modified retroviral vector. In an embodiment, modified retroviral vector will evade phagocytosis by macrophages.

[0589] Cells engage in phagocytosis, engulfing particles, enabling the sequestration and destruction of foreign invaders, like bacteria or dead cells. In some embodiments, phagocytosis of lentiviral vectors by macrophages would reduce their activity. In some embodiments, phagocytosis of lentiviral vectors is a measure of immunogenicity of retroviral vectors.

[0590] Retroviral vectors are produced from cells which lack CD47 (hereinafter NMC, positive control), cells that are transfected with CD47 cDNA (hereinafter NMC-CD47), and cells transfected with an empty vector control (hereinafter NMC-empty vector, negative control). Prior to retroviral vector production, the cells are labeled with CSFE.

[0591] Reduction of macrophage mediated immune clearance is determined with a phagocytosis assay according to the following protocol. Macrophages are plated immediately after harvest in confocal glass bottom dishes. Macrophages are incubated in DMEM+10% FBS+1% P/S for 1h to attach. An appropriate number of retroviral vectors produced from NMC, NMC-CD47, NMC-empty vector are added to the macrophages as indicated in the protocol, and are incubated for 2h, tools.thennofisher.com/content/sfs/manuals/mp06694.pdf.

[0592] After 2h, the dish is gently washed and intracellular fluorescence is examined. Intracellular fluorescence emitted by engulfed retroviral particles is imaged by confocal microscopy at 488 excitation. The number of phagocytotic positive macrophage is quantified using imaging software. The data is expressed as the phagocytic index=(total number of engulfed cells/total number of counted macrophages)×(number of macrophages containing engulfed cells/total number of counted macrophages)×100.

[0593] In an embodiment, the phagocytic index will be reduced when macrophages are incubated with retroviral vectors derived from NMC-CD47, versus those derived from NMC, or NMC-empty vector.

### Example 9: Modification of Retroviral Vector with Complement Regulatory Proteins to Evade Complement

[0594] This Example describes quantification of complement activity against a retroviral vector using an in vitro assay. In some embodiments a modified retroviral vector described herein will have reduced complement activity compared to an unmodified retroviral vector.

[0595] In this Example, serum from a mouse is assessed for complement activity against a retroviral vector. The example measures the level of complement C3a, which is a central node in all complement pathways. The methods described herein may be equally applicable to humans, rats, monkeys with optimization to the protocol.

[0596] In this example, retroviral vectors are generated from HEK293 cells transfected with a cDNA coding for complement regulatory protein DAF (HEK293-DAF retroviral vector) or HEK 293 cells not expressing a complementary regulatory protein (HEK293 retroviral vector). In other embodiments, other complement regulatory proteins may be used, such as proteins that bind decay-accelerating factor (DAF, CD55), e.g. factor H (FH)-like protein-1 (FHL-1), e.g. C4b-binding protein (C4BP), e.g. complement receptor 1 (CD35), e.g. Membrane cofactor protein (MCP, CD46), eg. Profectin (CD59), e.g. proteins that inhibit the classical and alternative complement pathway CD/C5 convertase enzymes, e.g. proteins that regulate MAC assembly.

[0597] Serum is recovered from naive mice, mice that are administered HEK293-DAF retroviral vector, or mice that are administered HEK293 retroviral vector. Sera are collected from mice by collecting fresh whole blood and allowing it to clot completely for several hours. Clots are pelleted by centrifugation and the serum supernatants are removed. A negative control is heat inactivated mouse serum. Negative control samples are heated at 56 degrees Celsius for 1 hour. Serum may be frozen in aliquots.

[0598] The different retroviral vectors are tested for the dose at which 50% of cells in a target cell population receive the exogenous agent in the retroviral vector. The retroviral vector may contain any of the exogenous agents described herein. Many methods for assaying retroviral delivery of an exogenous agent to recipient cells are also described herein. In this particular example, the exogenous agent is Cre protein (encoded by the retroviral nucleic acid) and the target cells are RPMI8226 cells which stably-express a “LoxP-GFP-stop-LoxP-RFP” cassette under a CMV promoter, which upon recombination by Cre switches from GFP to RFP expression, as a marker of delivery. The identified dose at which 50% of the recipient cells are RFP positive is used for further experiments. In some embodiments, the identified dose at which 50% of recipient cells receive the exogenous agent will be similar across retroviral vectors.

[0599] Two-fold dilutions in phosphate-buffered saline (PBS, pH 7.4) of the retroviral vectors, starting at the dose of retroviral vectors at which 50% of the target cells receive the exogenous agent, are mixed with a 1:10 dilution of the sera from mice treated with the same retroviral vectors or naive mice (assay volume, 20 l) and incubated for 1 h at 37° C. The samples are further diluted 1:500 and used in an enzyme-linked immunosorbent assay (ELISA) specific for C3a. The ELISA is mouse complement C3a ELISA Kit product LS-F4210 sold by LifeSpan BioSciences Inc, which measures the concentration of C3a in a sample. The dose of retroviral vector at which 200 μg/ml of C3a is present is compared across sera isolated from mice.

[0600] In some embodiments, the dose of retroviral vector at which 200 μg/ml of C3a is present will be greater for HEK293-DAF retroviral vector incubated with HEK-293 DAF mouse sera than for HEK293 retroviral vector incubated with HEK293 mouse sera, indicating that complement activity targeting retroviral vector is greater in mice treated with HEK293 retroviral vector than HEK293-DAF retroviral vector. In some embodiments, the dose of retroviral vector at which 200 μg/ml of C3a is present will be greater for HEK293-DAF retroviral vector incubated with naive mouse sera than for HEK293 retroviral vector incubated with naive mouse sera, indicating that complement activity targeting retroviral vector is greater in mice treated with HEK293 retroviral vector than HEK293-DAF retroviral vector.

### Example 10: Modification of Retroviral Vector to Knockdown Immunogenic Protein to Reduce Immunogenicity

[0601] This Example describes the generation of a retroviral vector composition derived from a cell source which has been modified to reduce expression of a molecule which is immunogenic, and quantification of the reduced expression. In an embodiment, a retroviral vector can be derived from a cell source, which has been modified to reduce expression of a molecule which is immunogenic.

[0602] Therapies that stimulate an immune response can reduce the therapeutic efficacy or cause toxicity to the recipient. Thus, immunogenicity is an important property for a safe and effective therapeutic retroviral vectors. Expression of certain immune activating agents can create an immune response. MHC class I represents one example of an immune activating agent.

[0603] Retroviral vectors are produced from unmodified cells which normally express MHC-1 (hereinafter NMC, positive control), cells that are transfected with a DNA coding for a shRNA targeting MHC class I (hereinafter NMC-shMHC class I), and cells transfected with a DNA coding for non-targeted scrambled shRNA vector control (hereinafter NMC-vector control, negative control). Prior to retroviral production, the cells are labeled with CSFE.

[0604] Retroviral vectors are assayed for expression of MHC class I using flow cytometry. An appropriate number of retroviral vectors are washed and resuspended in PBS, held on ice for 30 minutes with 1: 10-1: 4000 dilution of fluorescently conjugated monoclonal antibodies against MHC class I (Harlan Sera-Lab, Belton, UK). Retroviral vectors are washed three times in PBS and resuspended in PBS. Nonspecific fluorescence is determined, using equal aliquots of retroviral vector preparation incubated with and appropriate fluorescently conjugated isotype control antibody at equivalent dilutions. Retroviral vectors are assayed in a flow cytometer (FACSort, Becton-Dickinson) and the data is analyzed with flow analysis software (Becton-Dickinson).

[0605] The mean fluorescence data of the retroviral vectors derived from NMCs, NMC-shMHC class I, and NMC-vector control, is compared. In an embodiment, retroviral vectors derived from NMC-shMHC class I will have lower expression of MHC class I compared to NMCs and NMC-vector control.

### Example 11: Measuring Pre-Existing Serum Inactivation of Retroviral Vectors

[0606] This Example describes quantification of pre-existing serum inactivation of retroviral vectors using an in vitro delivery assay.

[0607] In some embodiments, a measure of immunogenicity for retroviral vectors is serum inactivation. Serum inactivation of retroviral vectors may be due to antibody-mediated neutralization or complement mediated degradation. In an embodiment, some recipients of a retroviral vectors described herein will have factors in their serum which bind to and inactivate retroviral vectors.

[0608] In this Example, a retroviral vector naive mouse is assessed for the presence of factors that inactivate retroviral vectors in serum. Notably, the methods described herein may be equally applicable to humans, rats, monkeys with optimization to the protocol.

[0609] The negative control is heat inactivated mouse serum and the positive control is serum derived from a mouse that has received multiple injections of retroviral vector generated from a xenogeneic source cell. Sera are collected from mice by collecting fresh whole blood and allowing it to clot completely for several hours. Clots are pelleted by centrifugation and the serum supernatants are removed. Negative control samples are heated at 56 degrees Celsius for 1 hour. Serum may be frozen in aliquots.

[0610] The retroviral vectors are tested for the dose at which 50% of cells in a target cell population receive the exogenous agent in the retroviral vector, as described above in Example 9.

[0611] To assess serum inactivation of retroviral vectors, retroviral vectors are diluted 1:5 into normal or heat-inactivated serum (or medium containing 10% heat-inactivated FBS as the no-serum control) and the mixture is incubated at 37° C. for 1 h. Following the incubation, medium is added to the reaction for an additional 1:5 dilution and then serially diluted twice at a 1:10 ratio. Following this step, the retroviral vectors should be present at the previously identified dose at which 50% of the recipient cells have received the exogenous agent (e.g. are RFP positive).

[0612] Retroviral vectors that have been exposed to serum are then incubated with target cells. The percent of cells which receive the exogenous agent, and thus are RFP positive, is calculated. In some embodiments, the percent of cells which receive the exogenous agent will not be different between retroviral vector samples that have been incubated with serum and heat-inactivated serum from retroviral vector naive mice, indicating that there is not serum inactivation of retroviral vector. In some embodiments, the percent of cells which receive the exogenous agent will not be different between retroviral vector samples that have been incubated with serum from retroviral vector naive mice and no-serum control incubations, indicating that there is not serum inactivation of retroviral vectors. In some embodiments, the percent of cells which receive the exogenous agent will be less in retroviral vector samples that have been incubated with positive control serum than in retroviral vector samples that have been incubated with serum from retroviral vector naive mice, indicating that there is not serum inactivation of retroviral vectors.

### Example 12: Measuring Serum Inactivation of Retroviral Vectors after Multiple Administrations

[0613] This Example describes quantification of serum inactivation of retroviral vectors using an in vitro delivery assay following multiple administrations of the retroviral vectors. In an embodiment, a modified retroviral vector, e.g., modified by a method described herein, will have a reduced (e.g., reduced compared to administration of an unmodified retroviral vector) serum inactivation following multiple (e.g., more than one, e.g., 2 or more) administrations of the modified retroviral vector. In an embodiment, a retroviral vector described herein will not be inactivated by serum following multiple administrations.

[0614] In some embodiments, a measure of immunogenicity for retroviral vector is serum inactivation. In an embodiment, repeated injections of a retroviral vector can lead to the development of anti-retroviral vector antibodies, e.g., antibodies that recognize retroviral vectors. In an embodiment, antibodies that recognize retroviral vectors can bind in a manner that can limit retroviral vector activity or longevity and mediate complement degradation.

[0615] In this Example, serum inactivation is examined after one or more administrations of retroviral vectors. Retroviral vectors are produced by any one of the previous Examples. In this example, retroviral are created from: cells that are transfected with HLA-G or HLA-E cDNA (hereinafter NMC-HLA-G), and cells transfected with an empty vector control (hereinafter NMC-empty vector, negative control). In some embodiments, retroviral vectors are derived from cells that are expressing other immunoregulatory proteins.

[0616] Serum is drawn from different cohorts: mice injected systemically and/or locally with 1, 2, 3, 5, or 10 injections of vehicle (retroviral vector naive group), HEK293-HLA-G retroviral vector, or HEK293 retroviral vector. Sera are collected from mice by collecting fresh whole blood and allowing it to clot completely for several hours. Clots are pelleted by centrifugation and the serum supernatants are removed. A negative control is heat inactivated mouse serum. Negative control samples are heated at 56 degrees Celsius for 1 hour. Serum may be frozen in aliquots.

[0617] The retroviral vectors are tested for the dose at which 50% of cells in a target cell population receive the exogenous agent in the retroviral vector, as described above in Example 9.

[0618] To assess serum inactivation of retroviral vectors, retroviral vectors are exposed to serum and incubated with target cells as described in Example 11 above.

[0619] The percent of cells which receive the exogenous agent, and thus are RFP positive, is calculated. In some embodiments, the percent of cells which receive the exogenous agent will not be different between retroviral vector samples that have been incubated with serum and heat-inactivated serum from mice treated with HEK293-HLA-G retroviral vectors, indicating that there is not serum inactivation of retroviral vectors or an adaptive immune response. In some embodiments, the percent of cells which receive the exogenous agent will not be different between retroviral vector samples that have been incubated from mice treated 1, 2, 3, 5 or 10 times with HEK293-HLA-G retroviral vectors, indicating that there is not serum inactivation of retroviral vectors or an adaptive immune response. In some embodiments, the percent of cells which receive the exogenous agent will not be different between retroviral vector samples that have been incubated with serum from mice treated with vehicle and from mice treated with HEK293-HLA-G retroviral vectors, indicating that there is not serum inactivation of retroviral vectors or an adaptive immune response. In some embodiments, the percent of cells which receive the exogenous agent will be less for retroviral vectors derived from HEK293 than for HEK293-HLA-G retroviral vectors indicating that there is not serum inactivation of HEK293-HLA-G retroviral vectors or an adaptive immune response.

### Example 13: Measuring Pre-Existing IgG and IgM Antibodies Reactive Against Retroviral Vectors

[0620] This Example describes quantification of pre-existing anti-retroviral vector antibody titers measured using flow cytometry.

[0621] In some embodiments, a measure of immunogenicity for a retroviral vector is antibody responses. Antibodies that recognize retroviral vector can bind in a manner that can limit retroviral vector activity or longevity. In an embodiment, some recipients of a retroviral vector described herein will have pre-existing antibodies which bind to and recognize retroviral vector.

[0622] In this Example, anti-retroviral vector antibody titers are tested using retroviral vector produced using a xenogeneic source cell. In this Example, a retroviral vector naive mouse is assessed for the presence of anti-retroviral vector antibodies. Notably, the methods described herein may be equally applicable to humans, rats, monkeys with optimization to the protocol.

[0623] The negative control is mouse serum which has been depleted of IgM and IgG, and the positive control is serum derived from a mouse that has received multiple injections of retroviral vector generated from a xenogeneic source cell.

[0624] To assess the presence of pre-existing antibodies which bind to retroviral vector, sera from retroviral vector-naïve mice is first decomplemented by heating to 56° C. for 30 min and subsequently diluted by 33% in PBS containing 3% FCS and 0.1% NaN₃. Equal amounts of sera and retroviral vector (1×10²-1×108 retroviral vectors per mL) suspensions are incubated for 30 min at 4° C. and washed with PBS through a calf-serum cushion.

[0625] IgM xenoreactive antibodies are stained by incubation of the retroviral vector with PE-conjugated goat antibodies specific for the Fc portion of mouse IgM (BD Bioscience) at 4° C. for 45 min. Notably, anti-mouse IgG1 or IgG2 secondary antibodies may also be used. Retroviral vector from all groups are washed twice with PBS containing 2% FCS and then analyzed on a FACS system (BD Biosciences). Fluorescence data are collected by use of logarithmic amplification and expressed as mean fluorescent intensity.

[0626] In an embodiment, the negative control serum will show negligible fluorescence comparable to the no serum or secondary alone controls. In an embodiment, the positive control will show more fluorescence than the negative control, and more than the no serum or secondary alone controls. In an embodiment, in cases where immunogenicity occurs, serum from retroviral vector-naive mice will show more fluorescence than the negative control. In an embodiment, in cases where immunogenicity does not occur, serum from retroviral vector-naive mice will show similar fluorescence compared to the negative control.

### Example 14: Measuring IgG and IgM Antibody Responses after Multiple Administrations of Retroviral Vectors

[0627] This Example describes quantification of the humoral response of a modified retroviral vector following multiple administrations of the modified retroviral vector. In an embodiment, a modified retroviral vector, e.g., modified by a method described herein, will have a reduced (e.g., reduced compared to administration of an unmodified retroviral vector) humoral response following multiple (e.g., more than one, e.g., 2 or more), administrations of the modified retroviral vector.

[0628] In some embodiments, a measure of immunogenicity for a retroviral vector is the antibody responses. In an embodiment, repeated injections of a retroviral vector can lead to the development of anti-retroviral vector antibodies, e.g., antibodies that recognize retroviral vector. In an embodiment, antibodies that recognize retroviral vector can bind in a manner that can limit retroviral vector activity or longevity.

[0629] In this Example, anti-retroviral vector antibody titers are examined after one or more administrations of retroviral vector. Retroviral vector is produced by any one of the previous Examples. In this example, retroviral are created from: cells that are not transfected with an immunomodulatory protein (NMCs), cells that are transfected with HLA-G or HLA-E cDNA (hereinafter NMC-HLA-G), and cells transfected with an empty vector control (hereinafter NMC-empty vector, negative control). In some embodiments, retroviral vectors are derived from cells that are expressing other immunoregulatory proteins.

[0630] Serum is drawn from different cohorts: mice injected systemically and/or locally with 1, 2, 3, 5, 10 injections of vehicle (retroviral vector naive group), NMC retroviral vector, NMC-HLA-G retroviral vector, or NMC-empty vectors retroviral vector.

[0631] To assess the presence and abundance of anti-retroviral vector antibodies, sera from the mice is first decomplemented by heating to 56° C. for 30 min and subsequently diluted by 33% in PBS with 3% FCS and 0.1% NaN₃. Equal amounts of sera and retroviral vector (1×10²-1×10⁸ retroviral vector per mL) are incubated for 30 min at 4° C. and washed with PBS through a calf-serum cushion.

[0632] Retroviral vector reactive IgM antibodies are stained by incubation of the retroviral vector with PE-conjugated goat antibodies specific for the Fc portion of mouse IgM (BD Bioscience) at 4° C. for 45 min. Notably, anti-mouse IgG1 or IgG2 secondary antibodies may also be used. Retroviral vector from all groups are washed twice with PBS containing 2% FCS and then analyzed on a FACS system (BD Biosciences). Fluorescence data are collected by use of logarithmic amplification and expressed as mean fluorescent intensity.

[0633] In an embodiment, NMC-HLA-G retroviral vectors will have decreased anti-viral IgM (or IgG1/2) antibody titers (as measured by fluorescence intensity on FACS) after injections, as compared to NMC retroviral vectors or NMC-empty retroviral vectors.

### Example 15: Measuring IgG and IgM Titers Antibody Responses to Retroviral Vector Recipient Cells

[0634] This Example describes quantification of antibody titers against recipient cells (cells that have fused with retroviral vectors) using flow cytometry. In some embodiments, a measure of the immunogenicity of recipient cells is the antibody response. Antibodies that recognize recipient cells can bind in a manner that can limit cell activity or longevity. In an embodiment, recipient cells will not be targeted by an antibody response, or an antibody response will be below a reference level.

[0635] In this Example, anti-recipient cell antibody titers in a subject (e.g., human, rat, or monkey) are tested. In addition, the protocol may be adapted to any cell type for which suitable surface markers exist. In this example, the target recipient cell is a CD3+ cell.

[0636] Mice are treated with retroviral vectors produced via any of the methods described in this application or with PBS (negative control) daily for 5 days. 28 days following the final treatment, peripheral blood is collected from mice that received retroviral vectors and mice that received PBS treatment. Blood is collected into 1 ml PBS containing 5 μM EDTA and mixed immediately to prevent clotting. The tubes are kept on ice and red blood cells are removed using a buffered ammonium chloride (ACK) solution. Cells are stained with a murine CD3-FITC antibody (Thermo Fisher Catalog #:11-0032-82), at 4° C. for 30 minutes in the dark, after being blocked with bovine serum albumin for 10 minutes. After being washed two times with PBS, cells are analyzed on a LSR II (BD Biosciences, San Jose, Calif.) with 488 nm laser excitation and emission collected at 530+/−30 nm running the FACSDiva™ software (BD Biosciences, San Jose, Calif.). CD3+ cells are sorted.

[0637] The sorted CD3+ cells are then stained with IgM antibodies by incubation of the reaction mixture with PE-conjugated goat antibodies specific for the Fc portion of mouse IgM (BD Bioscience) at 4° C. for 45 min. Notably, anti-mouse IgG1 or IgG2 secondary antibodies may also be used. Cells from all groups are washed twice with PBS containing 2% FCS and then analyzed on a FACS system (BD Biosciences). Fluorescence data are collected by use of logarithmic amplification and expressed as mean fluorescent intensity. The mean fluorescence intensity is calculated for the sorted CD3 cells from mice treated with retroviral vectors and the mice treated with PBS.

[0638] A low mean fluorescence intensity is indicative of a low humoral response against the recipient cells. Mice treated with PBS are expected to have low mean fluorescence intensity. In an embodiment, the mean fluorescence intensity will be similar for recipient cells from mice treated with retroviral vectors and mice treated with PBS.

### Example 16: Measuring Phagocytic Response to Retroviral Vector Recipient Cells

[0639] This Example describes quantification of macrophage response against recipient cells with a phagocytosis assay.

[0640] In some embodiments, a measure of the immunogenicity of recipient cells is the macrophage response. Macrophages engage in phagocytosis, engulfing cells and enabling the sequestration and destruction of foreign invaders, like bacteria or dead cells. In some embodiments, phagocytosis of recipient cells by macrophages would reduce their activity.

[0641] In an embodiment, recipient cells are not targeted by macrophages. In this Example, the macrophage response against recipient cells in a subject is tested. In addition, the protocol may be adapted to any cell type for which suitable surface markers exist. In this example, the target recipient cell is a CD3+ cell.

[0642] Mice are treated with retroviral vectors produced via any of the methods described in this application or with PBS (negative control) daily for 5 days. 28 days following the final treatment, peripheral blood is collected from mice that received retroviral vectors and mice that received PBS treatment. Blood is collected into 1 ml PBS containing 5 μM EDTA and mixed immediately to prevent clotting. The tubes are kept on ice and red blood cells are removed using a buffered ammonium chloride (ACK) solution.

[0643] Cells are stained with a murine CD3-FITC antibody (Thermo Fisher Catalog #:11-0032-82), at 4° C. for 30 minutes in the dark, after being blocked with bovine serum albumin for 10 minutes. After being washed two times with PBS, cells are analyzed on a LSR II (BD Biosciences, San Jose, Calif.) with 488 nm laser excitation and emission collected at 530+/−30 nm running the FACSDiva™ software (BD Biosciences, San Jose, Calif.). CD3+ cells are then sorted.

[0644] A phagocytosis assay is run to assess macrophage mediated immune clearance according to the following protocol. Macrophages are plated immediately after harvest in confocal glass bottom dishes. Macrophages are incubated in DMEM+10% FBS+1% P/S for 1h to attach. An appropriate number of sorted and FITC-stained CD3+ cells derived from mice that received retroviral vectors and PBS are added to the macrophages as indicated in the protocol, and are incubated for 2h, e.g., as described in the Vybrant™ Phagocytosis Assay Kit product information insert (Molecular Probes, revised 18 μMar. 2001, found at tools.thermofisher.com/content/sfs/manuals/mp06694.pdf).

[0645] After 2h, the dish is gently washed and intracellular fluorescence is examined. To identify macrophages, cells are first incubated with Fc-receptor blocking antibody (eBioscence cat. no. 14-0161-86, clone 93) for 15 min on ice to block the binding of labeled mAbs to Fc receptors, which are abundantly expressed on macrophages. Following this step anti-F4/80-PE (ThermoFisher cat. No. 12-4801-82, clone BM8) and anti-CD11b-PerCP-Cy5.5 (BD Biosciences cat. No. 550993, clone M1/70) conjugated antibodies are added to stain macrophage surface antigens. Cells are incubated for 30 min in the dark at 4 C followed by centrifugation and washing in PBS. The cells are then resuspended in PBS. Flow cytometry of samples is then performed and macrophages are identified via positive fluorescence signal for F4/80-PE and CD11b-PerCP-Cy5.5 using 533 nm and 647 nm laser excitation, respectively. After gating for macrophages, intracellular fluorescence emitted by engulfed recipient cells is assessed by 488 nm laser excitation. The number of phagocytotic positive macrophage is quantified using imaging software. The data is expressed as the phagocytic index=(total number of engulfed cells/total number of counted macrophages)×(number of macrophages containing engulfed cells/total number of counted macrophages)×100.

[0646] A low phagocytic index is indicative of low phagocytosis and targeting by macrophages. Mice treated with PBS are expected to have a low phagocytic index. In an embodiment, the phagocytic index will be similar for recipient cells derived from mice treated with retroviral vectors and mice treated with PBS.

### Example 17: Measuring PBMC Response to Retroviral Vector Recipient Cells

[0647] This Example describes quantification of a PBMC response against recipient cells with a cell lysis assay.

[0648] In some embodiments, a measure of the immunogenicity of recipient cells is the PBMC response. In an embodiment, cytotoxicity mediated cell lysis of recipient cells by PBMCs is a measure of immunogenicity, as lysis will reduce, e.g., inhibit or stop, the activity of a retroviral vector.

[0649] In an embodiment, recipient cells do not elicit a PBMC response. In this Example, the PBMC response against recipient cells in a subject is tested.

[0650] In addition, the protocol may be adapted to any cell type for which suitable surface markers exist. In this example, the target recipient cell is a CD3+ cell.

[0651] Mice are treated with retroviral vector produced via any of the methods described in this application or with PBS (negative control) daily for 5 days. 28 days following the final treatment, peripheral blood is collected from mice that received retroviral vector and mice that received PBS treatment. Blood is collected into 1 ml PBS containing 5 μM EDTA and mixed immediately to prevent clotting. The tubes are kept on ice and red blood cells are removed using a buffered ammonium chloride (ACK) solution. Cells are stained with a murine CD3:APC-Cy7 antibody (Biolgend Catalog #: 100330) or an isotype control APC-Cy7 (IC:APC-Cy7) antibody (Biolgend Catalog #: 400230) at 4° C. for 30 minutes in the dark, after being Fc blocked (Biolgend Catalog #: 101319) in cell staining buffer (Biolgend Catalog #: 420201) for 10 minutes. After being washed two times with PBS, cells are analyzed on a FACS Aria (BD Biosciences, San Jose, Calif.) with 640 nm laser excitation and emission collected at 780−/+60 nm running the FACSDiva™ software (BD Biosciences, San Jose, Calif.) to set negative gates using the isotype control APC-Cy7 antibody labelled cells and then APC-Cy7 positive cells are sorted and collected. Sorted CD3+ cells are then labelled with either CellMask™ Green Plasma membrane Stain (CMG, ThermoFisher Catalog #: C37608) or DMSO as the negative control.

[0652] 7 days prior to the isolation of CD3+ cells from the mice treated with retroviral vector or PBS, PBMCs are isolated from mice treated with retroviral vector or PBS according to the methods in Crop et al. Cell transplantation (20):1547-1559; 2011 and simulated in the presence of IL-2 recombinant mouse protein (R&D Systems Catalog #: 402-ML-020) and CD3/CD28 beads (ThermoFisher Catalog #: 11456D) in a round bottom 96 well plate for 7 days at 37 C. At day 7, the stimulated PBMCs are co-incubated with CD3+/CMG+ or CD3+/DMSO control cells for 1, 2, 3, 4, 5, 6, 8, 10, 15, 20, 24, 48 hours at a plating ratio of PBMC:CD3+/CMG+ or PBMC: CD3+/DMSO control cells ranging from 1000:1-1:1 and 1:1.25-1:1000. As a negative control a set of wells would receive CD3+/CMG+ and CD3+/DMSO control cells only, no PBMCs. After incubation, the plates are centrifuged and processed so that they are labelled with either murine CD3:APC-Cy7 antibody or an IC:APC-Cy7 antibody as per above. After being washed two times with PBS, cells are re-suspended in PBS and analyzed on a FACS Aria (APC-Cy7: 640 nm laser excitation/emission collected at 780−/+60 nm and CMG 561 nm laser excitation/emission collected at 585−/+16 nm) running the FACSDiva™ software (BD Biosciences, San Jose, Calif.). The FSC/SSC event data would then be used initially to set the gate for events labelled “cells”. This “cells” gate would be then used to display events to set the PMT voltage for the 640 nm and 561 nm laser analyzing samples labelled with IC:APC-Cy7/DMSO only. This sample would also be used to set the gates for negative cells for both APC-Cy7 and CMG. The CD3+/CMG+ cells that did not receive any PBMCs would then used to set the positive gates for CD3+ and CMG+ cells.

[0653] The data is analyzed by looking at the percentage of CD3+/CMG+ cells in the population of total cells. When comparing treatment groups, a relatively lower percentage of CD3+/CMG+ cells at any given assay ratio of PBMC:CD3+/CMG+ cells is indicative of recipient cell lysis. In an embodiment, the percent of CD3+/CMG+ will be similar for recipient cells derived from mice treated with retroviral vector and mice treated with PBS.

### Example 18: Measuring NK Cell Response to Retroviral Vector Recipient Cells

[0654] This Example describes quantification of a natural killer cell response against recipient cells with a cell lysis assay.

[0655] In some embodiments, a measure of the immunogenicity of recipient cells is the natural killer cell response. In an embodiment, cytotoxicity mediated cell lysis of recipient cells by natural killer cells is a measure of immunogenicity, as lysis will reduce, e.g., inhibit or stop, the activity of a retroviral vector.

[0656] In an embodiment, recipient cells do not elicit a natural killer cell response. In this Example, the natural killer response against recipient cells in a subject is tested. In addition, the protocol may be adapted to any cell type for which suitable surface markers exist. In this example, the target recipient cell is a CD3+ cell.

[0657] Mice are treated with retroviral vector, a blood sample is drawn, and CD3+ cells are sorted as described above in Example 17. NK cells are isolated, cultured with the CD3+ cells, and analyzed by FACS according to the protocol described above in Example 17 except that NK cells are used in place of the PBMC cells used in Example 17.

[0658] The data is analyzed by looking at the percentage of CD3+/CMG+ cells in the population of total cells. When comparing treatment groups, a relatively lower percentage of CD3+/CMG+ cells at any given assay ratio of NK cells:CD3+/CMG+ cells is indicative of recipient cell lysis. In an embodiment, the percent of CD3+/CMG+ will be similar for recipient cells derived from mice treated with retroviral vector and mice treated with PBS.

### Example 19: Measuring CD8 T Cell Response to Retroviral Vector Recipient Cells

[0659] This Example describes quantification of a CD8+ T cell response against recipient cells (cells that have fused with retroviral vectors) with a cell lysis assay.

[0660] In some embodiments, a measure of the immunogenicity of recipient cells is the CD8+ T cell response. In an embodiment, cytotoxicity mediated cell lysis of recipient cells by CD8+ T cells is a measure of immunogenicity, as lysis will reduce, e.g., inhibit or stop, the activity of a retroviral vector.

[0661] In an embodiment, recipient cells do not elicit a CD8+ T cell response. In this Example, the CD8+ T cell response against recipient cells in a subject is tested. In addition, the protocol may be adapted to any cell type for which suitable surface markers exist. In this example, the target recipient cell is a CD3+ cell.

[0662] Mice are treated with retroviral vector, a blood sample is drawn, and CD3+ cells are sorted as described above in Example 17. CD8+ T cells are isolated, cultured with the CD3+ cells, and analyzed by FACS according to the protocol described above in Example 17 except that CD8+ T cells are used in place of the PBMC cells used in Example 17.

[0663] The data is analyzed by looking at the percentage of CD3+/CMG+ cells in the population of total cells. When comparing treatment groups, a relatively lower percentage of CD3+/CMG+ cells at any given assay ratio of CD8+ cells:CD3+/CMG+ cells is indicative of recipient cell lysis. In an embodiment, the percent of CD3+/CMG+ will be similar for recipient cells derived from mice treated with retroviral vectors and mice treated with PBS.

### Example 20. Creating a Fusogen-Resistant Source Cell

[0664] This example describes a source cell that cannot be targeted (or is targeted at a reduced level) by a retroviral vector because the source cell has been modified so that the receptor that the retroviral vector targets is absent or at a reduced level.

[0665] In this Example the fusogen is Syncytin-1 (HERV-W), the receptor is ASCT2, and receptor expression is reduced in source cells using genome editing with Cas9 and a guide RNA targeting the ASCT2 locus. It is understood that a variety of other receptors can be downregulated by a variety of methods, e.g., using RNA interference.

[0666] A HEK293T source line is transfected with mRNA coding for Cas9 and a guide RNA targeting ASCT2 (HEK293T-ASCT2) or with control mRNA that does not express Cas9 (HEK293T-control). Cells are cultured for 3 weeks and then stained for ASCT2 expression using immunostaining and flow cytometry. In some embodiments, at least 90% of cells in the HEK293T-ASCT2 population will stain negative for ASCT2 and at least 90% of cells in the HEK293T-control population will stain positive for ASCT2. These cells are then used for subsequent experiments.

[0667] The cells are then transfected with lentiviral packaging vectors (Gag, Pol, and Rev), a Syncytin-1 envelope vector, and a payload vector encoding GFP. After 24 hours, the cells are imaged using microscopy to assay syncytia formation and then viral particles are collected from the supernatant.

[0668] The amount of syncytia in the source cell population can be assayed by quantifying the number of nuclei per syncytium microscopically after staining with DAPI. In some embodiments, the percent of nuclei per syncytium is less in HEK293T-ASCT2 source cells than in HEK293T-control source cells.

[0669] The amount of functional viral particles from HEK293T-ASCT2 source cells and HEK293T-control source cells is quantified by culturing HEK293T cells with the viral particles collected from the supernatant. The cells are cultured for 5 days after culturing with the viral particles and the percent of GFP positive cells is assayed via flow cytometry. In some embodiments, the percent of GFP positive cells will be greater in HEK293T cells treated with HEK293T-ASCT2 source cell-derived viral particles than in HEK293T-control source cell-derived viral particles.

### Example 21: Assessing Median Expression Level in Target Cells Over Time

[0670] This Example describes quantification of the expression of an exogenous agent in target cells by measuring exogenous agent levels in single cells.

[0671] In an embodiment, the exogenous agent level is greater than a house keeping gene. In an embodiment, payload expression is similar across target cells.

[0672] In this example, the target cell is a CD3+ cell. However, this protocol may be adapted to any cell type for which suitable surface markers exist and which can be isolated from the subject. Notably, the methods described herein may be equally applicable to humans, rats, monkeys with optimization to the protocol. In this example the payload is a fluorescent protein and expression is measured via flow cytometry. In other embodiments, the expression of a protein payload may be measured with immunostaining for the protein. In other embodiments expression of the protein payload may be measured via microscopy or Western blot.

[0673] Mice are treated with retroviral vector with a tdtomato fluorescent protein agent produced via any of the methods described in this application or with PBS (negative control). 7 days, 14 days, 28 days, 56 days, 112 days, 365 days, 730 days, and 1095 days following treatment, peripheral blood is collected from mice that received retroviral vector and mice that received PBS treatment. Blood is collected as described above in Example 2. Cells are stained with a murine CD3:APC-Cy7 antibody (Biolegend Catalog #: 100330) or isotype controls and analyzed by flow cytometry using the protocol described in Example 2.

[0674] The percent of CD3+ cells that are tdtomato positive is measured. In some embodiments, the percent of CD3+ cells that are tdtomato positive will be greater in cells from treated than untreated mice. In some embodiments, the percent of CD3+ cells that are tdtomato positive will be similar across cells collected at 7 days, 14 days, 28 days, 56 days, 112 days, 365 days, 730 days, or 1095 days. The median tdtomato fluorescence level is measured in CD3+ Tdtomato+ cells. In some embodiments, the median tdtomato fluorescence level in CD3+ Tdtomato+ cells will be similar in cells collected at 7 days, 14 days, 28 days, 56 days, 112 days, 365 days, 730 days, or 1095 days.

### Example 22: Assessment of Specificity of Transgene Expression Using Tissue-Specific Promoters and miRNA Mediated Gene Silencing

[0675] This Example describes quantification of an exogenous agent in target human hepatoma cell line (HepG2) and compared to non-target (non-hepatic) cell lines. Cell lines were transduced with lentiviruses (LV) containing positive TCSREs (e.g. tissue-specific promoter) or a combination of positive TCSREs and NTCSREs (e.g. miRNA-mediated gene silencing with a tissue-specific miRNA recognition sequence). Target and non-target cells lines were transduced with generated lentiviral particles containing the positive and negative regulatory elements and the effect of transgene expression in the cells lines was assessed.

### A. EFFECT OF MIRNA-MEDIATED GENE REGULATION ON SPECIFICITY OF TRANSGENE EXPRESSION

[0676] In addition to hepatocytes, major cell populations that line liver sinusoids include endothelial cells and Kupffer cells (resident macrophages derived from the hematopoietic lineage), which express mir-126-3p and mir-142-3p, respectively. These miRNAs are not substantially expressed in hepatocytes. Lentiviral vectors were constructed to contain an enhanced green fluorescent protein (eGFP) expression cassette under the control of the constitutively active promoter phosphoglycerate kinase (hPGK, positive TCSRE; see e.g. SEQ ID NO:139, with or without four tandem copies each of sequences complementary to mir-142-3p (e.g. Table 7, SEQ ID NO:143) and miR-126-3p (e.g. Table 7, SEQ ID NO:160) as an NTCSRE. Lentiviral vector (LV) constructs with the NTCSRE were designated hPGK-eGFP+miRT and constructs without the NTCSRE are designated hPGK-eGFP.

[0677] Lentiviruses (LVs) generated from these hPGK-eGFP+miRT and hPGK-eGFP vectors, respectively, were used to transduce a target human hepatoma cell line (HepG2), human embryonic kidney cell line (293LX), human T-cell line of hematopoietic origin (Molt4.8), or an endothelial cell line derived from mouse brain (bEND.3). Seven days post-transduction, GFP expression was measured by flow cytometry.

[0678] As shown in FIG. 1A, 18-30% of all cell types transduced with hPGK-eGFP LV expressed GFP. Following transduction of LVs containing mirT sequences (hPGK-eGFP+miRT) in non-target cells, only 0.6% GFP expression was observed in Molt4.8 cells (express mir-142-3p) and no expression was observed in bEND.3 cells (express mir-126-3p). Mild reduction of GFP expression was observed in 293LX cells, which may have very low level expression of one or both of these miRNAs. No effect on GFP expression was observed in HepG2 target cells that had been transduced with LVs containing mirT sequences (hPGK-eGFP+miRT). These results demonstrated that incorporation of miRT sequences in lentiviral vectors resulted in at least a 50-fold reduction in transgene expression in cells of the hematopoietic and endothelial lineages, while maintaining robust expression in hepatic cells.

### B. COMBINED EFFECT OF MIRNA-MEDIATED GENE REGULATION AND TISSUE-SPECIFIC PROMOTERS ON TRANSGENE EXPRESSION

[0679] Additional lentiviral vectors (LVs) were generated substantially as described above, but with either an eGFP or with a transgene encoding the enzyme phenylalanine ammonia lyase (PAL) with an N-terminal flag tag (nucleotide sequence shown below, under the control of a hepatocyte-specific human (ApoE.HCR-hAAT (hApoE) promoter (e.g., as shown in Table 6, SEQ ID NO:133) as a tissue-specific regulatory promoter as a positive TCSREs or a constitutively active Spleen-focus-forming Virus (SFFV) promoter (e.g., as shown in Table 6, SEQ ID NO:142). Expression of PAL in liver cells using the provided nucleic acid constructs is representative of expression of a desired exogenous agent in target cells. For example, endogenous PAH deficiency in human liver cells can result in toxic accumulation of Phe in the blood leading to phenylketonuria (PKU), a clinical condition characterized by severe neurological disorders and stunted growth. In some aspects, early administration of PAL to PKU patients has been shown to successfully decrease blood Phe levels and alleviate symptoms.

[0680] The nucleotide sequence of the PAL gene is shown (SEQ ID NO:169):

ATGGACTACAAAGACGATGACGACAAGGCCAAGACACTGTCTCAGGCC
CAGAGCAAGACCAGCAGCCAGCAGTTTAGCTTCACCGGCAACAGCAGC
GCCAACGTGATCATCGGCAACCAGAAGCTGACCATCAACGACGTGGCC
AGAGTGGCCCGGAATGGCACACTGGTGTCCCTGACCAACAACACCGAT
ATCCTGCAGGGCATCCAGGCCAGCTGCGACTACATCAACAACGCCGTG
GAAAGCGGCGAGCCCATCTACGGCGTGACATCTGGCTTTGGCGGCATG
GCTAATGTGGCCATCAGCAGAGAGCAGGCCAGCGAGCTGCAGACCAAT
CTCGTGTGGTTCCTGAAAACCGGCGCTGGCAACAAACTGCCCCTGGCT
GATGTTCGGGCTGCCATGCTGCTGAGAGCCAACTCTCACATGAGAGGC
GCCAGCGGCATCCGGCTGGAACTGATCAAGCGGATGGAAATCTTCCTG
AACGCTGGCGTGACCCCTTACGTGTACGAGTTTGGCTCTATCGGCGCC
TCCGGCGATCTGGTGCCTCTGTCTTACATCACCGGCAGCCTGATCGGC
CTGGATCCTAGCTTCAAGGTGGACTTCAACGGCAAAGAGATGGACGCC
CCTACCGCTCTGAGACAGCTGAATCTGAGCCCTCTGACACTGCTGCCC
AAAGAAGGCCTGGCCATGATGAATGGCACCAGCGTGATGACAGGGATC
GCCGCCAATTGCGTGTACGACACCCAGATCCTGACCGCCATTGCCATG
GGAGTGCACGCCCTGGATATTCAGGCCCTGAACGGCACCAACCAGAGC
TTTCACCCCTTCATCCACAACAGCAAGCCCCATCCTGGACAGCTGTGG
GCCGCTGATCAGATGATTAGCCTGCTGGCCAACAGCCAGCTCGTGCGG
GATGAGCTGGATGGCAAGCACGACTACAGAGATCACGAGCTGATCCAG
GACCGGTACAGCCTGAGATGCCTGCCTCAGTATCTGGGCCCTATCGTG
GATGGCATCTCTCAGATCGCCAAGCAGATCGAGATTGAGATCAACAGC
GTGACCGACAATCCCCTGATCGACGTGGACAACCAGGCCTCTTATCAC
GGCGGCAACTTTCTGGGCCAGTACGTCGGCATGGGCATGGACCACCTG
AGGTACTATATCGGCCTCCTGGCCAAGCACCTGGACGTGCAAATTGCC
CTGCTGGCAAGCCCCGAGTTCAGCAATGGACTGCCTCCTAGCCTGCTC
GGCAACCGCGAGAGAAAAGTGAACATGGGCCTGAAGGGCCTGCAGATC
TGTGGCAACTCCATCATGCCCCTGCTGACCTTCTACGGCAACTCTATC
GCCGACAGATTCCCCACACACGCCGAGCAGTTCAACCAGAACATCAAC
TCCCAGGGCTACACCAGCGCCACACTGGCTAGAAGAAGCGTGGACATC
TTCCAGAACTACGTGGCAATCGCCCTGATGTTTGGAGTGCAGGCCGTG
GACCTGCGGACCTACAAGAAAACAGGCCACTACGACGCCAGAGCCAGC
CTGTCTCCTGCCACCGAGAGACTGTATTCTGCCGTGCGGCATGTCGTG
GGCCAGAAGCCTACAAGCGACAGACCCTACATCTGGAACGACAACGAG
CAGGGCCTCGACGAGCACATTGCCAGAATCTCTGCCGATATCGCTGCC
GGCGGAGTGATTGTGCAGGCTGTGCAAGACATCCTGCCAAGCCTGCAC
TGA

[0681] As shown in FIG. 1B, transduction with LVs containing hPGK-eGFP or LVs containing 25 mirT sequences and GFP under the control of the hepatocyte specific promoter (hApoE-eGFP+miRT), resulted in greater than 250-fold repression of GFP expression in 293LX cells, with no substantial effect in HepG2 cells, as measured by flow cytometry.

[0682] HepG2 and 293LX cells were transduced with LVs containing the PAL transgene under the control of the SFFV promoter (SFFV-PAL), or LVs containing PAL transgene along with 30 mirT sequences under the control of the hApoE promoter (hApoE-PAL+miRT). PAL catalyzes the conversion of phenylalanine (Phe) to ammonia and cinnamic acid, and has been used in enzyme replacement therapy in patients with an inborn deficiency of phenylalanine hydroxylase (PAH). Specificity of PAL transgene expression was measured by reduction in Phe levels in culture supernatant (SN) relative to fresh medium.

[0683] As shown in FIG. 1C, expression from a constitutive promoter (SFFV) resulted in substantial reduction in Phe levels in SN collected from both cell types. However, the hApoE-PAL+miRT construct led to substantial Phe reduction only in HepG2 cells; Phe levels in SN collected from 293LX cells transduced with the hApoE-PAL+miRT LVs were indistinguishable from the untransduced controls. This result is consistent with high expression of the exemplary transgene PAL in HepG2 target cells when transduced with LV constructs containing a positive TSCRE and a NTSCRE but not in non-target 293LX cells.

### C. CONCLUSION

[0684] Together, these data are supportive of the finding that the use of a tissue-specific promoter in conjunction with miRNA target sites can impart substantial specificity to transgene expression.

What is claimed is:

1. A fusosome comprising:
a) a lipid bilayer comprising a fusogen; and
b) a nucleic acid that comprises or encodes:
(i) a positive target cell-specific regulatory element operatively linked to a nucleic acid encoding an exogenous agent, wherein the positive tissue-specific regulatory element increases expression of the exogenous agent in a target cell or tissue relative to an otherwise similar fusosome lacking the positive tissue-specific regulatory element; or
(ii) a non-target cell-specific regulatory element operatively linked to the nucleic acid encoding the exogenous agent, wherein the non-target cell-specific regulatory element decreases expression of the exogenous agent in a non-target cell or tissue relative to an otherwise similar fusosome lacking the non-target cell-specific regulatory element.

2. A fusosome comprising:
a) a lipid bilayer comprising a fusogen;
b) a nucleic acid that comprises or encodes:
(i) a positive target cell-specific regulatory element operatively linked to a nucleic acid encoding an exogenous agent, wherein the positive tissue-specific regulatory element increases expression of the exogenous agent in a target cell or tissue relative to an otherwise similar fusosome lacking the positive tissue-specific regulatory element; and
(ii) a non-target cell-specific regulatory element operatively linked to the nucleic acid encoding the exogenous agent, wherein the non-target cell-specific regulatory element decreases expression of the exogenous agent in a non-target cell or tissue relative to an otherwise similar fusosome lacking the non-target cell-specific regulatory element.

3. The fusosome of claim 1 or claim 2, wherein the fusosome comprises the exogenous agent or a nucleic acid encoding the exogenous agent.

4. The fusosome of any of the preceding claims, wherein one or more of:
i) the fusosome fuses at a higher rate with a target cell than with a non-target cell, optionally wherein the higher rate is by at least at least 1%, 2%, 3%, 4%, 5%, 10%, 20%, 30%, 40%, 50%, 60%, 70%, 80%, 90%, 2-fold, 3-fold, 4-fold, 5-fold, 10-fold, 20-fold, 50-fold, or 100-fold;
ii) the fusosome fuses at a higher rate with a target cell than with another fusosome, optionally wherein the higher rate is by at least 10%, 20%, 30%, 40%, 50%, 60%, 70%, 80%, or 90%, 2-fold, 3-fold, 4-fold, 5-fold, 10-fold, 20-fold, 50-fold, or 100-fold;
iii) the fusosome fuses with target cells at a rate such that the exogenous agent in the fusosome is delivered to at least 10%, 20%, 30%, 40%, 50%, 60%, 70%, 80%, or 90%, of target cells after 24, 48, or 72 hours;
iv) the fusosome delivers the nucleic acid to a target cell at a higher rate than to a non-target cell, optionally wherein the higher rate is by at least at least 1%, 2%, 3%, 4%, 5%, 10%, 20%, 30%, 40%, 50%, 60%, 70%, 80%, 90%, 2-fold, 3-fold, 4-fold, 5-fold, 10-fold, 20-fold, 50-fold, or 100-fold;
v) the fusosome delivers the nucleic acid to a target cell at a higher rate than to another fusosome, optionally wherein the higher rate is by at least 10%, 20%, 30%, 40%, 50%, 60%, 70%, 80%, or 90%, 2-fold, 3-fold, 4-fold, 5-fold, 10-fold, 20-fold, 50-fold, or 100-fold; or
vi) the fusosome delivers the nucleic acid to a target cell at a rate such that the exogenous agent in the fusosome is delivered to at least 10%, 20%, 30%, 40%, 50%, 60%, 70%, 80%, or 90%, of target cells after 24, 48, or 72 hours.

5. The fusosome of any of the preceding claims, wherein, when the fusosome is administered to a subject, one or more of:
i) less than 10%, 5%, 4%, 3%, 2%, or 1% of the exogenous agent detectably present in the subject is in non-target cells;
ii) at least 90%, 95%, 96%, 97%, 98%, or 99% of the cells of the subject that detectably comprise the exogenous agent, are target cells, optionally wherein the target cells are of a single cell type, optionally wherein the target cells are T cells;
iii) less than 1,000,000, 500,000, 200,000, 100,000, 50,000, 20,000, or 10,000 cells of the cells of the subject that detectably comprise the exogenous agent are non-target cells;
iv) average levels of the exogenous agent in all target cells in the subject are at least 100-fold, 200-fold, 500-fold, or 1,000-fold higher than average levels of the exogenous agent in all non-target cells in the subject; or
v) the exogenous agent is not detectable in any non-target cell in the subject.

6. The fusosome of any of the preceding claims, wherein the fusogen is a re-targeted fusogen.

7. The fusosome of claim 6, wherein the re-targeted fusogen comprises a sequence chosen from Nipah virus F and G proteins, measles virus F and H proteins, tupaia paramyxovirus F and H proteins, paramyxovirus F and G proteins or F and H proteins or F and HN proteins, Hendra virus F and G proteins, Henipavirus F and G proteins, Morbilivirus F and H proteins, respirovirus F and HN protein, a Sendai virus F and HN protein, rubulavirus F and HN proteins, or avulavirus F and HN proteins, or a derivative thereof, or any combination thereof.

8. The fusosome of any of the preceding claims, wherein the fusogen comprises a domain of at least 100 amino acids in length having at least 80%, 85%, 90%, 95%, 96%, 97%, 98%, or 99% sequence identity to a wild-type paramyxovirus fusogen, optionally wherein the wild-type paramyxovirus fusogen is set forth in any one of SEQ ID NOS: 1-132.

9. The fusosome of claim 8, wherein the wild-type paramyxovirus is a Nipah virus, optionally wherein the Nipah virus is a henipavirus.

10. The fusosome of any of the preceding claims, wherein the positive target cell-specific regulatory element comprises a tissue-specific promoter, a tissue-specific enhancer, a tissue-specific splice site, a tissue-specific site extending half-life of an RNA or protein, a tissue-specific mRNA nuclear export promoting site, a tissue-specific translational enhancing site, or a tissue-specific post-translational modification site.

11. The fusosome of any of the preceding claims, wherein the positive target cell-specific regulatory element comprises a tissue-specific promoter.

12. The fusosome of any of the preceding claims, wherein the non-target cell specific regulatory element comprises a tissue-specific miRNA recognition sequence, tissue-specific protease recognition site, tissue-specific ubiquitin ligase site, tissue-specific transcriptional repression site, or tissue-specific epigenetic repression site.

13. The fusosome of any of the preceding claims, wherein the non-target cell specific regulatory element comprises a tissue-specific miRNA recognition sequence.

14. The fusosome of claim 13, wherein the non-target cell specific regulatory element is situated or encoded within a transcribed region encoding the exogenous agent, optionally wherein an RNA produced by the transcribed region comprises the tissue-specific miRNA recognition sequence within a UTR or coding region.

15. The fusosome of any of the preceding claims, wherein the target cell is a cancer cell and the non-target cell is a non-cancerous cell.

16. The fusosome of any of the preceding claims, wherein the exogenous agent is an exogenous polypeptide or exogenous RNA, optionally wherein the exogenous agent is a therapeutic agent.

17. The fusosome of any of the preceding claims, wherein the fusosome further comprises:
i) a first exogenous or overexpressed immunosuppressive protein on the lipid bilayer and a second exogenous or overexpressed immunosuppressive protein on the lipid bilayer;
ii) a first exogenous or overexpressed immunosuppressive protein on the lipid bilayer and a second immunostimulatory protein that is absent or present at reduced levels, optionally wherein the reduced level is by at least 10%, 20%, 30%, 40%, 50%, 60%, 70%, 80%, or 90%, compared to a fusosome generated from an otherwise similar, unmodified source cell; or
iii) a first immunostimulatory protein that is absent or present at reduced levels, optionally wherein the reduced level by at least 10%, 20%, 30%, 40%, 50%, 60%, 70%, 80%, or 90%, compared to a fusosome generated from an otherwise similar, unmodified source cell and a second immunostimulatory protein that is absent or present at reduced levels, optionally wherein the reduced level is by at least 10%, 20%, 30%, 40%, 50%, 60%, 70%, 80%, or 90%, compared to a fusosome generated from an otherwise similar, unmodified source cell.

18. The method of claim 17, wherein, when administered to a subject, one or more of:
i) the fusosome does not produce a detectable antibody response, or antibodies against the fusosome are present at a level of less than 10%, 5%, 4%, 3%, 2%, or 1% above a background level;
ii) the fusosome does not produce a detectable cellular immune response, or a cellular immune response against the fusosome is present at a level of less than 10%, 5%, 4%, 3%, 2%, or 1% above a background level;
iii) the fusosome does not produce a detectable innate immune response, or the innate immune response against the fusosome is present at a level of less than 10%, 5%, 4%, 3%, 2%, or 1% above a background level;
iv) less than 10%, 5%, 4%, 3%, 2%, or 1% of fusosomes are inactivated by serum;
v) a target cell that has received the exogenous agent from the fusosome does not produce a detectable antibody response, or antibodies against the target cell are present at a level of less than 10%, 5%, 4%, 3%, 2%, or 1% above a background level; or
vi) a target cell that has received the exogenous agent from the fusosome does not produce a detectable cellular immune response, or a cellular response against the target cell is present at a level of less than 10%, 5%, 4%, 3%, 2%, or 1% above a background level.

19. A fusosome comprising:
a) a lipid bilayer comprising a fusogen, and
b) an exogenous agent or a nucleic acid encoding an exogenous agent; and
c) one or more of:
i) a first exogenous or overexpressed immunosuppressive protein on the lipid bilayer and a second exogenous or overexpressed immunosuppressive protein on the lipid bilayer;
ii) a first exogenous or overexpressed immunosuppressive protein on the lipid bilayer and a second immunostimulatory protein that is absent or present at reduced levels, optionally wherein the reduced level is by at least 10%, 20%, 30%, 40%, 50%, 60%, 70%, 80%, or 90%, compared to a fusosome generated from an otherwise similar, unmodified source cell; or
iii) a first immunostimulatory protein that is absent or present at reduced levels, optionally wherein the reduced level is reduced by at least 10%, 20%, 30%, 40%, 50%, 60%, 70%, 80%, or 90%, compared to a fusosome generated from an otherwise similar, unmodified source cell and a second immunostimulatory protein that is absent or present at reduced levels, optionally wherein the reduced level is reduced by at least 10%, 20%, 30%, 40%, 50%, 60%, 70%, 80%, or 90%, compared to a fusosome generated from an otherwise similar, unmodified source cell;
wherein, when administered to a subject, optionally wherein the subject is a human subject or a mouse, one or more of:
i) the fusosome does not produce a detectable antibody response, or antibodies against the fusosome are present at a level of less than 10%, 5%, 4%, 3%, 2%, or 1% above a background level;
ii) the fusosome does not produce a detectable cellular immune response, or a cellular immune response against the fusosome is present at a level of less than 10%, 5%, 4%, 3%, 2%, or 1% above a background level;
iii) the fusosome does not produce a detectable innate immune response, or the innate immune response against the fusosome is present at a level of less than 10%, 5%, 4%, 3%, 2%, or 1% above a background level;
iv) less than 10%, 5%, 4%, 3%, 2%, or 1% of fusosomes are inactivated by serum;
v) a target cell that has received the exogenous agent from the fusosome does not produce a detectable antibody response, or antibodies against the target cell are present at a level of less than 10%, 5%, 4%, 3%, 2%, or 1% above a background level; or
vi) a target cell that has received the exogenous agent from the fusosome does not produce a detectable cellular immune response, or a cellular response against the target cell is present at a level of less than 10%, 5%, 4%, 3%, 2%, or 1% above a background level.

20. The fusosome of claim 18 or claim 19, wherein the background level is the corresponding level in the same subject prior to administration of the fusosome.

21. The fusosome of any one of claims 17-20, wherein the immunosuppressive protein is a complement regulatory protein or CD47.

22. The fusosome of any one of claims 18-21, wherein the immunostimulatory protein is an MHC, optionally wherein the MHC is an HLA, protein.

23. A fusosome, comprising:
a) a lipid bilayer comprising a fusogen, and
b) a nucleic acid encoding an exogenous agent;
c) an exogenous or overexpressed MHC, optionally wherein the MHC is an HLA, optionally wherein the HLA is an HLA-G or HLA-E, or a combination thereof, on the lipid bilayer.

24. The fusosome of any one of claims 19-23, wherein the fusogen comprises a domain of at least 100 amino acids in length having at least 80%, 85%, 90%, 95%, 96%, 97%, 98%, or 99% sequence identity to a wild-type paramyxovirus fusogen set forth in any one of SEQ ID NOS: 1-132.

25. A fusosome comprising:
a) a lipid bilayer comprising a fusogen, wherein the fusogen comprises a domain of at least 100 amino acids in length having at least 80%, 85%, 90%, 95%, 96%, 97%, 98%, or 99% sequence identity to a wild-type paramyxovirus fusogen set forth in any one of SEQ ID NOS: 1-132;
b) a nucleic acid encoding an exogenous agent; and
c) an exogenous or overexpressed CD47 or a complement regulatory protein, or a combination thereof, on the lipid bilayer.

26. A fusosome comprising:
a) a lipid bilayer comprising a fusogen, wherein the fusogen comprises a domain of at least 100 amino acids in length having at least 80%, 85%, 90%, 95%, 96%, 97%, 98%, or 99% sequence identity to a wild-type paramyxovirus fusogen set forth in any one of SEQ ID NOS: 1-132, and
b) a nucleic acid encoding an exogenous agent; and
c) MHC I, optionally wherein the MHC I is HLA-A, HLA-B, or HLA-C, or MHC II, optionally wherein MHC II is HLA-DP, HLA-DM, HLA-DOA, HLA-DOB, HLA-DQ, or HLA-DR, that is absent or present at reduced levels, optionally wherein the reduced level is, reduced by at least 10%, 20%, 30%, 40%, 50%, 60%, 70%, 80%, or 90%, compared to a fusosome generated from an otherwise similar, unmodified source cell.

27. A fusosome comprising:
a) a lipid bilayer comprising a fusogen, wherein the fusogen comprises a domain of at least 100 amino acids in length having at least 80%, 85%, 90%, 95%, 96%, 97%, 98%, or 99% sequence identity to a wild-type paramyxovirus fusogen set forth in any one of SEQ ID NOS: 1-132; and
b) a nucleic acid encoding an exogenous agent; and
c) one or both of an exogenous or overexpressed immunosuppressive protein or an immunostimulatory protein that is absent or present at reduced levels, optionally wherein the reduced level is reduced by at least 10%, 20%, 30%, 40%, 50%, 60%, 70%, 80%, or 90%, compared to a fusosome generated from an otherwise similar, unmodified source cell.

28. The fusosome of any of the preceding claims, wherein the nucleic acid comprises w one or more insulator elements.

29. A fusosome comprising:
a) a lipid bilayer comprising a fusogen, wherein the fusogen comprises a domain of at least 100 amino acids in length having at least 80%, 85%, 90%, 95%, 96%, 97%, 98%, or 99% sequence identity to a wild-type paramyxovirus fusogen set forth in any one of SEQ ID NOS: 1-132; and
b) a nucleic acid encoding an exogenous agent, wherein the nucleic acid comprises one or more insulator elements.

30. The fusosome of claim 28 or claim 29, wherein the nucleic acid comprises two insulator elements, optionally wherein the two insulator elements comprise a first insulator element upstream of a region encoding the exogenous agent and a second insulator element downstream of a region encoding the exogenous agent, optionally wherein the first insulator element and second insulator element comprise the same or different sequences.

31. The fusosome of any one of claims 28-30, wherein variation in the median exogenous agent level in a sample of cells isolated after administration of the fusosome to the subject at a first timepoint is at least, less than, or about 10,000%, 5,000%, 2,000%, 1,000%, 500%, 200%, 100%, 50%, 20%, 10%, or 5% of the median exogenous agent level in a sample of cells isolated after administration of the fusosome to the subject at a second, later timepoint.

32. The fusosome of any one of claims 28-31, wherein at least 10%, 20%, 30%, 40%, 50%, 60%, 70%, 80%, or 90% of target cells in the subject detectably comprise the exogenous agent.

33. The fusosome of any one of claims 28-32, wherein at least 10%, 20%, 30%, 40%, 50%, 60%, 70%, 80%, or 90% of target cells in the subject that detectably comprised the exogenous agent at a first time point still detectably comprise the exogenous agent at a second, later timepoint.

34. The fusosome of any one of claims 28-33, which is not genotoxic or does not increase the rate of tumor formation in target cells.

35. The fusosome of any one of claims 19-34, wherein the exogenous agent is an exogenous polypeptide or an exogenous RNA, optionally wherein the exogenous agent is a therapeutic agent.

36. A method of delivering an exogenous agent to a subject comprising administering to the subject a fusosome of any of the preceding claims, thereby delivering the exogenous agent to the subject, optionally wherein the subject is a human subject.

37. A method of modulating a function, in a subject, target tissue or target cell, comprising contacting the target tissue or the target cell a fusosome of any of the preceding claims, optionally wherein the subject is a human subject.

38. The method of claim 37, wherein the target tissue or the target cell is present in a subject.

39. The method of claim 37 or claim 38, wherein the contacting is carried out by administering the fusosome to the subject.

40. A method of treating or preventing a disorder, in a subject, comprising administering to the subject a fusosome of any one of the preceding claims, optionally wherein the subject is a human subject.

41. A method of making a fusosome of any one of the preceding claims, comprising:
a) providing a cell that comprises the nucleic acid and the fusogen (e.g., re-targeted fusogen);
b) culturing the cell under conditions that allow for production of the fusosome, and
c) separating, enriching, or purifying the fusosome from the cell, thereby making the fusosome.

42. A source cell for producing a fusosome, comprising:
a) a nucleic acid;
b) structural proteins that can package the nucleic acid, wherein at least one structural protein comprises a fusogen that binds a fusogen receptor; and
c) a fusogen receptor that is absent or present at reduced levels (e.g., reduced by at least 10%, 20%, 30%, 40%, 50%, 60%, 70%, 80%, or 90%) compared to an otherwise similar, unmodified source cell.

43. The source cell of claim 42, wherein the fusogen causes fusion of the fusosome with the target cell upon binding to the fusogen receptor.

44. The source cell of claim 42 or 43, which binds to the second similar source cell, e.g., the fusogen of the source cell binds to the fusogen receptor on the second source cell.

45. A population of source cells of any one of claims 42-44.

46. The population of source cells of claim 45, wherein less than 10%, 5%, 4%, 3%, 2%, or 1% of cells in the population are multinucleated.

The application's sequence listing, which the Patent Office published only in electronic form, follows.

SEQUENCE LISTING (169 sequences)

SEQ ID NO: 1 - protein, 589 aa, Human respiratory syncytial virus
  MISC_FEATURE: fusion protein
MIPQARTELNLGQITMELLIHRSSAIFLTLAINALYLTSSQNITEEFYQSTCSAVSRGYLSALRTGWYTSVITIELSNIKETKCNGTDTKVKLIKQELDKYKNAVTELQLLMQNTPAANNRARREAPQYMNYTINTTGSLNVSISKKRKRRFLGFLLGVGSAIASGIAVSKVLHLEGEVNKIKNALLSTNKAVVSLSNGVSVLTSKVLDLKNYINNQLLPIVNQQSCRISNIETVIEFQQKNSRLLEITREFSVNAGVTTPLSTYMLTNSELLSLINDMPITNDQKKLMSSNVQIVRQQSYSIMSIIKEEVLAYVVQLPIYGVIDTPCWKLHTSPLCTTNIKEGSNICLTRTDRGWYCDNAGSVSFFPQADTCKVQSNRVFCDTMNSLTLPSEVSLCNTDIFNSKYDCKIMTSKTDISSSVITSLGAIVSCYGKTKCTASNKNRGIIKTFSNGCDYVSNKGVDTVSVGNTLYYVNKLEGKNLYVKGEPIINYYDPLVFPSDEFDASISQVNEKINQSLAFIRRSDELLHNVNTGKSTTNIMITAIIIVIIVVLLSLIAIGLLLYCKAKNTPVTLSKDQLSGINNIAFSK

SEQ ID NO: 2 - protein, 553 aa, Newcastle disease virus
  misc_feature: fusion protein
MDPKPSTSYLHAFPLIFVAISLVFMAGRASALDGRPLAAAGIVVTGDKAVNIYTSSQTGTIIIKLLPNMPKDKEQCAKSPLDAYNRTLTTLLAPLGDSIRRIQESVTTSGGERQERLVGAIIGGVALGVATAAQITAASALIQANQNAANILKLKESIAATNEAVHEVTSGLSQLAVAVGKMQQFVNDQFNKTAQEIDCIKITQQVGVELNLYLTELTTVFGPQITSPALTQLTIQALYNLAGGNMDYMLTKLGVGNNQLSSLISSGLISGNPILYDSQTQLLGIQVTLPSVGNLNNMRATYLETLSVSTNKGFASALVPKVVTQVGSVIEELDTSYCIETDLDLYCTRIVTFPMSPGIFSCLGGNTSACMYSKTEGALTTPYMTLKGSVIANCKMTTCRCADPPGIISQNYGEAVSLIDKKVCNILTLDGITLRLSGEFDATYQKNISIQDSQVVITGNLDISTELGNVNNSISNALDKLEESNSKLDKVNVRLTSTSALITYIVLTTIALICGIVSLVLACYIMYKQKAQQKTLLWLGNNTLDQMRATTKM

SEQ ID NO: 3 - protein, 553 aa, Measles virus strain AIK-C
  MISC_FEATURE: fusion protein
MSIMGLKVNVSAIFMAVLLTLQTPTGQIHWGNLSKIGVVGIGSASYKVMTRSSHQSLVIKLMPNITLLNNCTRVEIAEYRRLLRTVLEPIRDALNAMTQNIRPVQSVASSRRHKRFAGVVLAGAALGVATAAQITAGIALHQSMLNSQAIDNLRASLETTNQAIEAIRQAGQEMILAVQGVQDYINNELIPSMNQLSCDLIGQKLGLKLLRYYTEILSLFGPSLRDPISAEISIQALSYALGGDINKVLEKLGYSGGDLLGILESRGIKARITHVDTESYFIVLSIAYPTLSEIKGVIVHRLEGVSYNIGSQEWYTTVPKYVATQGYLISNFDESSCTFMPEGTVCSQNALYPMSPLLQECLRGYTKSCARTLVSGSFGNRFILSQGNLIANCASILCKCYTTGTIINQDPDKILTYIAADNCPVVEVNGVTIQVGSRRYPDAVYLHRIDLGPPILLERLDVGTNLGNAIAKLEDAKELLESSDQILRSMKGLSSTCIVYILIAVCLGGLIGIPALICCCRGRCNKKGEQVGMSRPGLKPDLTGTSKSYVRSL

SEQ ID NO: 4 - protein, 539 aa, Human metapneumovirus
  MISC_FEATURE: fusion glycoprotein precursor
MSWKVVIIFSLLITPQHGLKESYLEESCSTITEGYLSVLRTGWYTNVFTLEVGDVENLTCSDGPSLIKTELDLTKSALRELKTVSADQLAREEQIEKPRQSRFVLGAIALGVATAAAVTAGVAIAKTIRLESEVTAIKNALKTTNEAVSTLGNGVRVLATAVRELKDFVSKNLTRAINKNKCDIDDLKMAVSFSQFNRRFLNVVRQFSDNAGITPAISLDLMTDAELARAVSNMPTSAGQIKLMLENRAMVRRKGFGILIGVYGSSVIYMVQLPIFGVIDTPCWIVKAAPSCSEKKGNYACLLREDQGWYCQNAGSTVYYPNEKDCETRGDHVFCDTAAGINVAEQSKECNINISTTNYPCKVSTGRHPISMVALSPLGALVACYKGVSCSIGSNRVGIIKQLNKGCSYITNQDADTVTIDNTVYQLSKVEGEQHVIKGRPVSSSFDPIKFPEDQFNVALDQVFENIENSQALVDQSNRILSSAEKGNTGFIIVIILIAVLGSSMILVSIFIIIKKTKKPTGAPPELSGVTNNGFIPHS

SEQ ID NO: 5 - protein, 540 aa, Bovine parainfluenza virus 3
  MISC_FEATURE: fusion protein
MIIIVITMILSLTPSSLCQIDITKLQSVGVLVNSPKGIKISQNFETRYLILSLIPKIEDSHSCGNQQIDQYKKLLDRLIIPLYDGLKLQKDVIVVNHESHNNTNLRTKRFFGEIIGTIAIGIATSAQITAAVALVEAKQARSDIDKLKEAIKDTNKAVQSIQSSVGNLIVAVKSVQDYVNNEIVPSITRLGCEAAGLQLGIALTQHYSELTNIFGDNIGTLGEKGVKLQGIASLYRTNITEVFTTSTVDQYDIYDLLFTESIKMRVIDVDLSDYSITLQVRLPLLTKVSNTQIYKVDSISYNIQGKEWYIPLPHHIMTKGAFLGGADIKECIESFSNYICPSDPGFILNHEMENCLSGNITQCPKTIVTSDIVPRYAFVDGGVIANCIPTTCTCNGIDNRINQSPDQGIKIITYKECQIVGINGMLFKTNQEGTLAKYTFDNIKLNNSVALNPIDISLELNKAKSDLEESKRWIEKSNQKLDSIGSWHQSSVTIIIIIVMIVVLLIINAIIIMIMIRYLRDRNRHLNNKDSEPYVLTNRQ

SEQ ID NO: 6 - protein, 538 aa, Mumps virus
  MISC_FEATURE: fusion protein
MKVFLVTCLGFAVFSSSVCVNINILQQIGYIKQQVRQLSYYSQSSSSYIVVKLLPNIQPTDNSCEFKSVTQYNKTLSNLLLPIAENINNIASPSSGSRRHKRFAGIAIGIAALGVATAAQVTAAVSLVQAQTNARAIAAMKNSIQATNRAVFEVKEGTQRLAIAVQAIQDHINTIMNTQLNNMSCQILDNQLATSLGLYLTELTTVFQPQLINPALSPISIQALRSLLGSMTPAVVQATLSTSISAAEILSAGLMEGQIVSVLLDEMQMIVKINIPTIVTQSNALVIDFYSISSFINNQESIIQLPDRILEIGNEQWSYPAKNCKLTRHHIFCQYNEAERLSLESKLCLAGNISACVFSPIAGSYMRRFVALDGTIVANCRSLTCLCKSPSYPIYQPDHHAVTTIDLTACQTLSLDGLDFSIVSLSNITYAENLTISLSQTINTQPIDISTELSKVNASLQNAVKYIKESNHQLQSVNVNSKIGAIIVAALVLSILSIIISLLFCCWAYVATKEIRRINFKTNHINTISSSVDDLIRY

SEQ ID NO: 7 - protein, 671 aa, Canine distemper virus
  MISC_FEATURE: fusion protein
MNPHEQTIPMHEKIPKRSKTQTHTQQDLPQQHSTKSAESKTSRARHSITSAQRSTHYDPRTADWPDYYIMKRTRSCKQASYRSDNIPAHGDHDGIIHHTPESVSQGAKSRLKMGQSNAVKSGSQCTWLVLWCIGVASLFLCSKAQIHWNNLSTIGIIGTDSVHYKIMTRPSHQYLVIKLMPNVSLIDNCTKAELDEYEKLLSSILEPINQALTLMTKNVKPLQSVGSGRRQRRFAGVVLAGAALGVATAAQITAGIALHQSNLNAQAIQSLRTSLEQSNKAIEEIREATQETVIAVQGVQDYVNNELVPAMQHMSCELVGQRLGLKLLRYYTELLSIFGPSLRDPISAEISIQALSYALGGEIHKILEKLGYSGNDMIAILESRGIKTKITHVDLPGKFIILSVSYPTLSEVKGVIVHRLEAVSYNIGSQEWYTTVPRYVATNGYLISNFDESSCVFVSESAICSQNSLYPMSPLLQQCIRGDTSSCARTLVSGTMGNKFILSKGNIVANCASILCKCYSTSTIINQSPDKLLTFIASDTCPLVEIDGVTIQVGSRQYPDMVYESKVALGPAISLERLDVGTNLGNALKKLDDAKVLIDSSNQILETVRRSSFNFGSLLSVPILSCTALALLLLICCCKRRYQQTHKQNTKVDPTFKPDLTGTSRSYVRSL

SEQ ID NO: 8 - protein, 546 aa, Peste-des-petits-ruminants virus
  MISC_FEATURE: fusion protein
MTRVAILTFLFLFPNAVACQIHWGNLSKIGIVGTGSASYKVMTRPSHQTLVIKLMPNITAIDNCTKSEIAEYKRLLITVLKPVEDALSVITKNVRPIQTLTPGRRTRRFAGAVLAGVALGVATAAQITAGVALHQSLMNSQAIESLKTSLEKSNQAIEEIRLANKETILAVQGVQDYINNELVPSVHRMSCELVGHKLGLKLLRYYTEILSIFGPSLRDPIAAEISIQALSYALGGDINRILDKLGYSGGDFLAILESKGIKARVTYVDTRDYFIILSIAYPTLSEIKGVIVHKIEAITYNIGAQEWYTTIPKYVATQGYLISNFDETSCVFTPDGTVCSQNALYPMSPLLQECFQGSTKSCARTLVSGTISNRFILSKGNLIANCASVLCKCYTTETVISQDPDKLLTVVASDKCPVVEVDGVTIQVGSREYPDSVYLHKIDLGPAISLEKLDVGTNLGNAVTRLENAKELLDASDQILKTVKGVPFGGNMYIALAACIGVSLGLVTLICCCKGRCKNKEVPISKINPGLKPDLTGTSKSYVRSL

SEQ ID NO: 9 - protein, 546 aa, Hendra virus
  MISC_FEATURE: fusion protein
MATQEVRLKCLLCGIIVLVLSLEGLGILHYEKLSKIGLVKGITRKYKIKSNPLTKDIVIKMIPNVSNVSKCTGTVMENYKSRLTGILSPIKGAIELYNNNTHDLVGDVKLAGVVMAGIAIGIATAAQITAGVALYEAMKNADNINKLKSSIESTNEAVVKLQETAEKTVYVLTALQDYINTNLVPTIDQISCKQTELALDLALSKYLSDLLFVFGPNLQDPVSNSMTIQAISQAFGGNYETLLRTLGYATEDFDDLLESDSIAGQIVYVDLSSYYIIVRVYFPILTEIQQAYVQELLPVSFNNDNSEWISIVPNFVLIRNTLISNIEVKYCLITKKSVICNQDYATPMTASVRECLTGSTDKCPRELVVSSHVPRFALSGGVLFANCISVTCQCQTTGRAISQSGEQTLLMIDNTTCTTVVLGNIIISLGKYLGSINYNSESIAVGPPVYTDKVDISSQISSMNQSLQQSKDYIKEAQKILDTVNPSLISMLSMIILYVLSIAALCIGLITFISFVIVEKKRGNYSRLDDRQVRPVSNGDLYYIGT

SEQ ID NO: 10 - protein, 565 aa, Sendai virus
  MISC_FEATURE: fusion protein
MATYIQRVQCISALLSVVLTTLVSCQIPRDRLSNIGVIVDEGKSLKIAGSHESRYIVLSLVPGIDLENGCGTAQVIQYKSLLNRLLIPLRDALDLQEALITVTNDTMTGADVPQSRFFGAVIGTIALGVATSAQITAGIALAEAREAKRDIALIKESMTKTHKSIELLQNAVGEQILALKTLQDFVNDEIKPAISELGCETAALRLGIKLTQHYSELLTAFGSNFGTIGEKSLTLQALSSLYSANITEIMTTIRTGQSNIYDVIYTEQIKGTVIDVDLERYMVTLSVKIPILSEVPGVLIHKASSISYNIDGEEWYVTVPSHILSRASFLGGANIADCVESRLTYICPRDPAQLIPDSQQKCILGDTTRCPVTKVVDNIIPKFAFVNGGVVANCIASTCTCGTGRRPISQDRSKGVVFLTHDNCGLIGVNGIELYANRKGHDATWGVQNLTVGPAIAIRPVDISLNLAAATDFLQDSRAELEKARKILSEVGRWYNSGATLITIIVVMIVVLVVIIVIVIVLYRLRRSMLMSNPAGRISRDTYTLEPKIRHMYTNGGFDAMTEKR

SEQ ID NO: 11 - protein, 555 aa, Human parainfluenza virus 1 strain Washington/1964
  MISC_FEATURE: F glycoprotein
MQKSEILFLVYSSLLLSSSLCQIPVEKLSNVGVIINEGKLLKIAGSYESRYIVLSLVPSIDLQDGCGTTQIIQYKNLLNRLLIPLKDALDLQESLITITNDTTVTNDNPQTRFFGAVIGTIALGVATAAQITAGIALAEAREARKDIALIKDSIVKTHNSVELIQRGIGEQIIALKTLQDFVNDEIRPAIGELRCETTALKLGIKLTQHYSELATAFSSNLGTIGEKSLTLQALSSLYSANITEILSTTKKDKSDIYDIIYTEQVKGTVIDVDLEKYMVTLLVKIPILSEIPGVLIYRASSISYNIEGEEWHVAIPNYIINKASSLGGADVTNCIESKLAYICPRDPTQLIPDNQQKCILGDVSKCPVTKVINNLVPKFAFINGGVVANCIASTCTCGTNRIPVNQDRSRGVTFLTYTNCGLIGINGIELYANKRGRDTTWGNQIIKVGPAVSIRPVDISLNLASATNFLEESKTELMKARAIISAVGGWHNTESTQIIMIIIVCILIIIICGILYYLYRVRRLLVMINSTHNSPVNAYTLESRMRNPYMGNNSN

SEQ ID NO: 12 - protein, 543 aa, Feline morbillivirus
  MISC_FEATURE: fusion protein
MGKIRVIIISSLLLSNITTAQVGWDNLTSIGVISTKQYDYKITTLNTNQLMVIKMVPNISSIINCTKPELMKYRELVLGVIRPINESLELMNSYINMRAGSERFIGAVIAGVALGVATAAQITSGIALHNSIMNKRQIQELRKALSTTNKAIDEIRIAGERTLIAVQGVQDYINNIIIPMQDKLQCDILSSQLAIALLRYYTNILTVFGPSIRDPVTSIISIQALSQAFNGNLQALLDGLGYTGRDLRDLLESRSITGQIIHADMTDLFLVLRINYPSITEMQGVTIYELNSITYHIGPEEWYTIMPNFIAVQGFLTSNFDERKCSITKSSILCQQNSIYPMSTEMQRCIKGEIRFCPRSKAVGTLVNRFILTKGNLMANCLGVICRCYSSGQIITQDPSKLITIISQEECKEVGVDGIRIMVGPRKLPDVIFNARLEVGVPISLSKLDVGTDLAIASAKLNNSKALLEQSDKILDSMSKLDSINSRITGLILAIMAIFIITVTIIWIIYKRCRNKDNKFSTSIEPLYIPPSYNSPHSVVKSI

SEQ ID NO: 13 - protein, 534 aa, Avian paramyxovirus 2
  MISC_FEATURE: fusion protein
MIAALFISLFATCGALDNSVLAPVGIASAQEWQLAAYTNTLSGTIAVRFVPVLPGNLSTCAQATLAEYNKTVTNILGPLKENLETLLSEPTKTAARFVGAIIGTVALGVATSAQITAAVALNQAQENARNIWRLKESIRKTNEAVLELKDGLASTAIALDKVQKFINEDIIPQIKEIDCQVVANKLGVYLSLYLTELTTIFGAQITNPALTPLSYQALYNLCGGDMGKLTELIGVKAKDINSLYEANLITGQVIGYDSESQIILIQVSYPSVSEVTGVRATELVTVSVTTPKGEGRAIAPKYVAQSRVVTEELDTSTCRFSKTTLYCRSIITRPLPPLIANCLNGLYQDCQYTTEIGALSSRFITVNGGIIANCRATICKCVNPPKIIVQSDASSLTVIDSAICKDVVLDNVQLRLEGKLSAQYFTNITIDLSQITTSGSLDISSEIGSINNTVNKVEELIAESNAWLQAVNPHLVNNTSIIVLCVLAAIFVVWLVALTGCLAYYIKKSSATRMVGIGSSPAGNPYVAQSATKM

SEQ ID NO: 14 - protein, 555 aa, Avian paramyxovirus 6
  MISC_FEATURE: fusion protein
MGARLGPLAMAPGRYVIIFNLILLHRVVSLDNSRLLQQGIMSATEREIKVYTNSITGSIAVRLIPNLPQEVLKCSAGQIKSYNDTLNRIFTPIKANLERLLATPSMLEDNQNPAPEPRLIGAIIGTAALGLATAAQVTAALALNQAQDNAKAILNLKESITKTNEAVLELKDATGQIAIALDKTQRFINDNILPAINNLTCEVAGAKVGVELSLYLTELSTVFGSQITNPALSTLSIQALMSLCGNDFNYLLNLMGAKHSDLGALYEANLINGRIIQYDQASQIMVIQVSVPSISSISGLRLTELFTLSIETPVGEGKAVVPQFVVESGQLLEEIDTQACTLTDTTAYCTIVRTKPLPELVAQCLRGDESRCQYTTGIGMLESRFGVFDGLVIANCKATICRCLAPEMIITQNKGLPLTVISQETCKRILIDGVTLQIEAQVSGSYSRNITVGNSQIAPSGPLDISSELGKVNQSLSNVEDLIDQSNQLLNRVNPNIVNNTAIIVTIVLLVLLVLWCLALTISILYVSKHAVRMIKTVPNPYVMQAKSPGSATQF

SEQ ID NO: 15 - protein, 545 aa, Fer-de-Lance paramyxovirus
  MISC_FEATURE: fusion protein F
MTRITILQIILTLTLPVMCQVSFDNLEQVGVMFDKPKFLKITGPASTATMIIKLIPTLGTMESCGTSAVNEYKKTLDTILVPLRDTINKLSTDITVVEGTSNISNKREKRFVGIAIAVGAVALATSAQITAGIALSNTIKNAEAIESIKSSIQASNQAIQKVIDAQGRTVTVINGIQDHINSVINPALNQLGCDVAKNTLAISLTQYFSKLSLLFGPNLRNPVEQPLSVQAIAGLMDGDINAVVSQLGYTQSDLLDLLSTESIVGTVTAIDMVNYMIQIEMSFPQYITIPDTKVLEGHKITFNDKGSEWQTQVPSTIAVRDILIAGVDPDGCSITSTSYICKNDPTYAMSEVLTNCFRGNTQECPRARITSTFATRFAIARSTVIANCVAAVCLCGDPGIPVVQKAEVTLTAMTLDQCSLITVDGLQIKPSKSIANVTANFGNITLGPVVSVGDLDLSAELTKVQSDLKEAQDKLDESNAILQGINNKILTAPTSIALIVVSVVVILLIIGMISWLVWLTKAVRRSNTRSERVTPSAYNNLGFIK

SEQ ID NO: 16 - protein, 566 aa, Avian paramyxovirus 4
  MISC_FEATURE: fusion protein
MRLSRTILTLILGTLTGYLMGAHSTNVNEGPKSEGIRGDLIPGAGIFVTQVRQLQIYQQSGYHDLVIRLLPLLPAELNDCQREVVTEYNNTVSQLLQPIKTNLDTLLADGGTRDADIQPRFIGAIIATGALAVATVAEVTAAQALSQSKTNAQNILKLRDSIQATNQAVFEISQGLEATATVLSKLQTELNENIIPSLNNLSCAAMGNRLGVSLSLYLTLMTTLFGDQITNPVLTPISYSTLSAMAGGHIGPVMSKILAGSVTSQLGAEQLIASGLIQSQVVGYDSQYQLLVIRVNLVRIQEVQNTRVVSLRTLAVNRDGGLYRAQVPPEVVERSGIAERFYADDCVLTTTDYICSSIRSSRLNPELVKCLSGALDSCTFERESALLSTPFFVYNKAVVANCKAATCRCNKPPSIIAQYSASALVTITTDTCADLEIEGYRFNIQTESNSWVAPNFTVSTSQIVSVDPIDISSDIAKINSSIEAAREQLELSNQILSRINPRIVNDESLIAIIVTIVVLSLLVIGLIVVLGVMYKNLKKVQRAQAAMMMQQMSSSQPVTTKLGTPF

SEQ ID NO: 17 - protein, 551 aa, Human parainfluenza virus 2
  MISC_FEATURE: fusion protein
MHHLHPMIVCIFVMYTGIVGSDAIAGDQLLNIGVIQSKIRSLMYYTDGGASFIVVKLLPNLPPSNGTCNITSLDAYNVTLFKLLTPLIENLSKISTVTDTKTRQKRFAGVVVGLAALGVATAAQITAAVAIVKANANAAAINNLASSIQSTNKAVSDVIDASRTIATAVQAIQDRINGAIVNGITSASCRAHDALIGSILNLYLTELTTIFHNQITNPALTPLSIQALRILLGSTLPIVIESKLNTNFNTAELLSSGLLTGQIISISPMYMQMLIQINVPTFIMQPGAKVIDLIAISANHKLQEVVVQVPNRILEYANELQNYPANDCVVTPNSVFCRYNEGSPIPESQYQCLRGNLNSCTFTPIIGNFLKRFAFANGVLYANCKSLLCRCADPPHVVSQDDTQGISIIDIKRCSEMMLDTFSFRITSTFNATYVTDFSMINANIVHLSPLDLSNQINSINKSLKSAEDWIADSNFFANQARTAKTLYSLSAIALILSVITLVVVGLLIAYIIKLVSQIHQFRSLAATTMFHRENPAFFSKNNHGNIYGIS

SEQ ID NO: 18 - protein, 541 aa, Porcine rubulavirus
  MISC_FEATURE: fusion protein
MPQQQVAHTCVMLWGIISTVSGINTEALSQYGVVVTNVRQLTYYTQAGSTYLAVRLLPSLASPDQSCALHSIINYNATLQAILSPIAENLNLISTALREQHRKKRFAGVAIGLTALGVATAAQATAAVALVRANKNAEKVEQLSQALGETNAAISDLIDATKNLGFAVQAIQNQINTAILPQIHNLSCQVIDAQLGNILSLYLTELTTVFQPQLTNPALSPLTIQALRAVLGTTLPALLSEKLKSNIPLGDLMSSGLLKGQLVGLNLQNMLMIIELYIPTLSTHSTAKVLDLVTISSHVNGREVEIQVPNRVLELGSEVLGYGGSECALTMSHILCPFNDARVLSTDMKYCLQGNITHCIFSPVVGSFLRRFALVNGVVIANCADMSCVCFDPQEIIYQNFQEPTTVIDIKKCGKVQLDTLTFTISTFANRTYGPPAYVPPDNIIQSEPLDISGNLIAVNNSLSSALNHLATSEILRNEQIWTSSLGISTIVALVIIGILIICLVVTWAALWALLKEVRGLNSAVNSQLSSYVMGDKFIRY

SEQ ID NO: 19 - protein, 551 aa, Parainfluenza virus 5
  MISC_FEATURE: fusion protein
MGTRIQFLMVSCLLAGTGSLDPAALMQIGVIPTNVRQLMYYTEASSAFIVVKLMPTIDSPISGCNITSISSYNATMTKLLQPIGENLETIRYQLIPTRRRRRFVGVVIGLAALGVATAAQVTAAVALVKANKNAAAILNLKNAIQKTNAAVADVVQATQSLGTAVQAVQDHINSVVSPAITAANCKAQDAIIGSILNLYLTELTTIFHNQITNPALSPITIQALRILLGSTLPTVVRKSFNTQISAAELLSSGLLTGQIVGLDLTYMQMVIKIELPTLTVQPATQIIDLVTISAFINNREVMAQLPTRIIVTGSLIQAYPASQCTITPNTVYCRYNDAQVLSDDTMACLQGNLTRCTFSPVVGSFLTRFVLFDGIVYANCRSMLCKCMQPAAVILQPSSSPVTVIDMHKCVSLQLDNLRFTITQLANITYNSTIKLETSQILPIDPLDISQNLAAVNKSLSDALQHLAQSDTYLSAITSATTTSVLSIIAICLGSLGLILIILISVVVWKLLTIVAANRNRMENFVYHNSAFHHSRSDLSEKNQPATLGTR

SEQ ID NO: 20 - protein, 537 aa, Murine pneumonia virus
  MISC_FEATURE: fusion glycoprotein precursor
MIPGRIFLVLLVIFNTKPIHPNTLTEKFYESTCSVETAGYKSALRTGWHMTVMSIKLSQINIESCKSSNSLLAHELAIYSSAVDELRTLSSNALKSKRKKRFLGLILGLGAAVTAGVALAKTVQLESEIALIRDAVRNTNEAVVSLTNGMSVLAKVVDDLKNFISKELLPKINRVSCDVHDITAVIRFQQLNKRLLEVSREFSSNAGLTHTVSSFMLTDRELTSIVGGMAVSAGQKEIMLSSKAIMRRNGLAILSSVNADTLVYVIQLPLFGVMDTDCWVIRSSIDCHNIADKYACLARADNGWYCHNAGSLSYFPSPTDCEIHNGYAFCDTLKSLTVPVTSRECNSNMYTTNYDCKISTSKTYVSTAVLTTMGCLVSCYGHNSCTVINNDKGIIRTLPDGCHYISNKGVDRVQVGNTVYYLSKEVGKSIVVRGEPLVLKYDPLSFPDDKFDVAIRDVEHSINQTRTFLKASDQLLDLSENRENKNLNKSYILTTLLFVVMLIIIMAVIGFILYKVLKMIRDNKLKSKSTPGLTVLS

SEQ ID NO: 21 - protein, 543 aa, Human parainfluenza virus 4a
  MISC_FEATURE: fusion protein
MGVKGLSLIMIGLLISPITNLDITHLMNLGTVPTAIRSLVYYTYTKPSYLTVDLIPNLKNLDQNCNYSSLNYYNKTALSLIQPIADNINRLTKPITSSEIQSRFFGAVIGTIALGVATAAQVTAAIGLAKAQENAKLILTLKKAATETNEAVRDLANSNKIVVKMISAIQNQINTIIQPAIDQINCQIKDLQVANILNLYLTEITTVFHNQLTNPALESISIQALKSLLGPTLPEVLSKLDLNNISAASVMASGLIKGQIIAVDIPTMTLVLMVQIPSISPLRQAKIIDLTSITIHTNSQEVQAVVPARFLEIGSEILGFDGSVCQITKDTIFCPYNDAYELPIQQKRCLQGQTRDCVFTPVAGTFPRRFLTTYGTIVANCRDLVCSCLRPPQIIYQPDENPVTIIDKDLCTTLTLDSITIEIQKSINSTFRREVVLESTQVRSLTPLDLSTDLNQYNQLLKSAEDHIQRSTDYLNSINPSIVNNNAIIILIILCILLILTVTICIIWLKYLTKEVKNVARNQRLNRDADLFYKIPSQIPVPR

SEQ ID NO: 22 - protein, 538 aa, Tioman virus
  MISC_FEATURE: fusion protein
MRIALTAVIVSIHFDLAFPMNKNSLLSVGLVHKSVKNLYFYSQGSPSYIVVKLVPTLGNVPGNCTLNSLVRYKSTVSSLLSPLAENLEYLQKTLTVSRGGRRRRFAGVAIGLAALGVAAAAQATAAVALVEARQNAAQIQSLSEAIQNTNLAVNELKTAIGASATAIQAIQTQINEVINPAINRLSCEILDAQLASMLNLYLIHLTTVFQNQLTNPALTPLSIQSLQSLLQGTSSVLTNITSSSKLALNDALVTGLITGQVVGLNMTSLQIVIAAYVPSVAKLSNAVVHNFIRITTSVNGTEVIIQSPTIIMEQNEVMYDLKTGHCTESDLNIYCPYVDAQLLSPGMTNCINGRLNDCTFSKVVGSFPTRFAAVEGAILANCKYLQCNCLTPPYIITPLNGEMISMIDLSKCQRLDLGTIVFDINNPVNVTFNGNYRADVGQMIVTNPLDISAELNQINTSLSNAQGFLSKSDAWLHVSQWVTNSGTIFIILIIGLIVGIVYMIINTYVVVQIIKEINRMRTSDRAHLLKGSISSIST

SEQ ID NO: 23 - protein, 543 aa, Avian paramyxovirus 8
  MISC_FEATURE: fusion protein
MGQISVYLINSVLLLLVYPVNSIDNTLIAPIGVASANEWQLAAYTTSLSGTIAVRFLPVLPDNMTTCLRETITTYNNTVNNILGPLKSNLDALLSSETYPQTRLIGAVIGSIALGVATSAQITAAVALKQAQDNARNILALKEALSKTNEAVKELSSGLQQTAIALGKIQSFVNEEILPSINQLSCEVTANKLGVYLSLYLTELTTIFGAQLTNPALTSLSYQALYNLCGGNMAMLTQKIGIKQQDVNSLYEAGLITGQVIGYDSQYQLLVIQVNYPSISEVTGVRATELVTVSVTTDKGEGKAIVPQFVAESRVTIEELDVASCKFSSTTLYCRQVNTRALPPLVASCLRGNYDDCQYTTEIGALSSRYITLDGGVLVNCKSIVCRCLNPSKIISQNTNAAVTYVDATICKTIQLDDIQLQLEGSLSSVYARNISIEISQVTTSGSLDISSEIGNINNTVNRVEDLIHQSEEWLAKVNPHIVNNTTLIVLCVLSALAVIWLAVLTAIIIYLRTKLKTISALAVTNTIQSNPYVNQTKRESKF

SEQ ID NO: 24 - protein, 546 aa, Tailam virus
  MISC_FEATURE: fusion protein
MKLSVVYTTLLVSTFYSDLARSQLALSELTKIGVIPGRSYDLKISTQASYQYMVVKLIPNLTGLNNCTNGTIEAYKKMLNRLLSPIDAALRKMKDAVNDKPPESVGNVKFWGAVIGGVALGVATSAQITAGVALHNSIQNANAILALKDSIRQSNKAIQELQTAMSTTVVVLNALQDQINNQLVPAINSLGCQVVANTLGLKLNQYFSEISLVFGPNLRDPTSETLSIQALSRAFNGDFDSMLSKLKYDDSDFLDLLESDSIRGRIIDVSLSDYLITIQIEYPALLSIKDAVIQTFNLISYNTRGTEWISIFPKQLLVRGTYISNIDISQCVIAATSIICKSDTSTPISSATWSCATGNITNCARTRVVNAHVPRFALYGGVVFANCAPVVCKCQDPLYSINQEPKVTNVMVDVDACKEMYLDGLYITLGKTQISRAMYAEDVSLGGPISVDPIDLGNEINSINSAINRSEEHLNHANELLDKVNPRIVNVKTFGVMIGLLVLVVLWCVITLVWLICLTKQLARTAYAGSMGSRASTVNSLSGFVG

SEQ ID NO: 25 - protein, 557 aa, Porcine parainfluenza virus 1
  MISC_FEATURE: fusion protein
MQVTTLRPAIILSIALLVTGQVPRDKLANLGIIIKDSKALKIAGSYENRYIVLSLVPTIDNVNGCGSIQIAKYKEMLERLLIPIKDALDLQESLIVIDNETVNNNYSPQYRFVGAIIGTIALGVATAAQVTAGVALMEAREAKRDISMLKEAIEKTQNSIEKLQNSAGEQILALKMLQDYVNGEIKPAIEELGCETAALKLGIALTQHYTELTNAFGSNLGSIGEKSLTLQALSSLYKTNITNILTATNLGKTDIYDIIYAEQVKGRVIDVDLKRYMVTISVKIPILSEIPGVLIYEVSSISYNIDGAEWYAAVPDHILSKSAYIGGADISDCIESRLTYICPQDPAQIIADNQQQCFFGHLDKCPITKVIDNLVPKFAFINGGVVANCIASTCTCGEERIQVSQDRNKGVTFLTHNNCGLIGINGIEFHANKKGSDATWNVSPIGVGPAVSLRPVDISLQIVAATNFLNSSRKDLMKAKEILNQVGNLKDLTTITIINIVIIIILLICVIGLGILYHQLRSALGMRDKMSVLNNSSYSLEPRTAQVQVIKPTSFMG

SEQ ID NO: 26 - protein, 538 aa, Avian metapneumovirus
  MISC_FEATURE: F protein
MDVRICLLLFLISNPSSCIQETYNEESCSTVTRGYKSVLRTGWYTNVFNLEIGNVENITCNDGPSLIDTELVLTKNALRELKTVSADQVAKESRLSSPRRRRFVLGAIALGVATAAAVTAGVALAKTIRLEGEVKAIKNALRNTNEAVSTLGNGVRVLATAVNDLKEFISKKLTPAINQNKCNIADIKMAISFGQNNRRFLNVVRQFSDSAGITSAVSLDLMTDDELVRAINRMPTSSGQISLMLNNRAMVRRKGFGILIGVYDGTVVYMVQLPIFGVIETPCWRVVAAPLCRKRRGNYACILREDQGWYCTNAGSTAYYPNKDDCEVRDDYVFCDTAAGINVALEVDQCNYNISTSKYPCKVSTGRHPVSMVALTPLGGLVSCYESVSCSIGSNKVGIIKQLGKGCTHIPNNEADTITIDNTVYQLSKVVGEQRTIKGAPVVNNFNPILFPVDQFNVALDQVFESIDRSQDLIDKSNDLLGADAKSKAGIAIAIVVLVILGIFFLLAVIYYCSRVRKTKPKHDYPATTGHSSMAYVS

SEQ ID NO: 27 - protein, 545 aa, Avian paramyxovirus 13 goose/Kazakhstan/5751/2013
  MISC_FEATURE: fusion protein
MARFSWEIFRLSTILLIAQTCQGSIDGRLTLAAGIVPVGDRPISIYTSSQTGIIVVKLIPNLPDNKKDCAKQSLQSYNETLSRILTPLATAMSAIRGNSTTQVRENRLVGAIIGSVALGVATAAQITAATALIQANQNAANIARLANSIAKTNEAVTDLTEGLGTLAIGVGKLQDYVNEQFNNTAVAIDCLTLESRLGIQLSLYLTELMGVFGNQLTSPALTPITIQALYNLAGGNLNALLSRLGASETQLGSLINSGLIKGMPIMYDDANKLLAVQVELPSIGKLNGARSTLLETLAVDTTRGPSSPIIPSAVIEIGGAMEELDLSPCITTDLDMFCTKIISYPLSQSTLSCLNGNLSDCVFSRSEGVLSTPYMTIKGKIVANCKQVICRCMDPPQILSQNYGEALLLIDENTCRSLELSGVILKLAGTYESEYTRNLTVDPSQVIITGPLDISAELSKVNQSIDSAKENIAESNKFLSQVNVKLLSSSAMITYIVATVVCLIIAITGCVIGIYTLTKLKSQQKTLLWLGNNAEMHGSRSKTSF

SEQ ID NO: 28 - protein, 554 aa, Menangle virus
  MISC_FEATURE: fusion protein
MMPRVLGMIVLYLTHSQILCINRNTLYQIGLIHRSVKKVNFYSQGSPSYIVVKLVPTLAAIPPNCSIKSLQRYKETVTSLVQPISDNLGYLQDKLVTGQSRRRRRFAGVAIGLAALGVAAAAQATAAVALVETRENAGKIQALSESIQNTNQAVHSLKTALGFSATAIQAIQNQVNEVINPAINKLSCEVLDSQLASMLNLYLIHLTTVFQTQLTNPALTPLSIQALTSVLQGTSGVLMNSTNSTLTQPIDLLATGLITGQIISVNMTSLQLIIATFMPSIAELPNAVLHSFFRITTSVNLTEVMIQSPEFIMEQNGVFYDFNTAHCQLGDNNVYCPYIDAARLSSMMTNCINGNLGECVFSRVIGSFPSRFVSLNGAILANCKFMRCNCLSPEKIITPLDGEMISLIDLRVCQKLTLGTITFEISQPVNVSFQGGFVANAGQIIVTNPFDISAELGQINNSLNDAQGFLDQSNNWLKVSGWINNSGSLFIAGIVVIGLIVLCIVIIIYINVQIIREVNRLRSFIYRDYVLDHDKAPYSPESSSPHRKSLKTVS

SEQ ID NO: 29 - protein, 544 aa, Avian paramyxovirus 5
  MISC_FEATURE: fusion protein
MLQLPLTILLSILSAHQSLCLDNSKLIHAGIMSTTEREVNVYAQSITGSIVVRLIPNIPSNHKSCATSQIKLYNDTLTRLLTPIKANLEGLISAVSQDQSQNSGKRKKRFVGAVIGAAALGLATAAQVTATVALNQAQENARNILRLKNSIQKTNEAVMELKDAVGQTAVAIDKTQAFINNQILPAISNLSCEVLGNKIGVQLSLYLTELTTVFGNQLTNPALTTLSLQALYNLCGDDFNYLINLLNAKNRNLASLYEANLIQGRITQYDSMNQLLIIQVQIPSISTVSGMRVTELFTLSVDTPIGEGKALVPKYVLSSGRIMEEVDLSSCAITSTSVFCSSIISRPLPLETINCLNGNVTQCQFTANTGTLESRYAVIGGLVIANCKAIVCRCLNPPGVIAQNLGLPITIISSNTCQRINLEQITLSLGNSILSTYSANLSQVEMNLAPSNPLDISVELNRVNTSLSKVESLIKESNSILDSVNPQILNVKTVIILAVIIGLIVVWCFILTCLIVRGFMLLVKQQKFKGLSVQNNPYVSNNSH

SEQ ID NO: 30 - protein, 557 aa, Cedar virus
  MISC_FEATURE: fusion glycoprotein
MSNKRTTVLIIISYTLFYLNNAAIVGFDFDKLNKIGVVQGRVLNYKIKGDPMTKDLVLKFIPNIVNITECVREPLSRYNETVRRLLLPIHNMLGLYLNNTNAKMTGLMIAGVIMGGIAIGIATAAQITAGFALYEAKKNTENIQKLTDSIMKTQDSIDKLTDSVGTSILILNKLQTYINNQLVPNLELLSCRQNKIEFDLMLTKYLVDLMTVIGPNINNPVNKDMTIQSLSLLFDGNYDIMMSELGYTPQDFLDLIESKSITGQIIYVDMENLYVVIRTYLPTLIEVPDAQIYEFNKITMSSNGGEYLSTIPNFILIRGNYMSNIDVATCYMTKASVICNQDYSLPMSQNLRSCYQGETEYCPVEAVIASHSPRFALTNGVIFANCINTICRCQDNGKTITQNINQFVSMIDNSTCNDVMVDKFTIKVGKYMGRKDINNINIQIGPQIIIDKVDLSNEINKMNQSLKDSIFYLREAKRILDSVNISLISPSVQLFLIIISVLSFIILLIIIVYLYCKSKHSYKYNKFIDDPDYYNDYKRERINGKASKSNNIYYVGD

SEQ ID NO: 31 - protein, 546 aa, Rinderpest morbillivirus
  MISC_FEATURE: F protein
MGILFAALLAMTNPHLATGQIHWGNLSKIGVVGTGSASYKVMTQSSHQSLVIKLMPNVTAIDNCTKTEIMEYKRLLGTVLKPIREALNAITKNIKPIQSSTTSRRHKRFAGVVLAGAALGVATAAQITAGIALHQSMMNSQAIESLKASLETTNQAIEEIRQAGQEMVLAVQGVQDYINNELVPAMGQLSCEIVGQKLGLKLLRYYTEILSLFGPSLRDPVSAELSIQALSYALGGDINKILEKLGYSGSDLLAILESKGIKAKITYVDIESYFIVLSIAYPSLSEIKGVIVHRLESVSYNIGSQEWYTTVPRYVATQGYLISNFDDTPCAFTPEGTICSQNALYPMSPLLQECFRGSTRSCARTLVSGSIGNRFILSKGNLIANCASILCKCYTTGSIISQDPDKILTYIAADQCPVVEVGGVTIQVGSREYSDAVYLHEIDLGPPISLEKLDVGTNLWNAVTKLEKAKDLLDSSDLILENIKGVSVTNTGYILVGVGLIAVVGILIITCCCKKRRSDNKVSTMVLNPGLRPDLTGTSKSYVRSL

SEQ ID NO: 32 - protein, 536 aa, Avian paramyxovirus 10
  MISC_FEATURE: fusion protein
MTRTRLLFLLTCYIPGAVSLDNSILAPAGIISASERQIAIYTQTLQGTIALRFIPVLPQNLSSCAKDTLESYNSTVSNLLLPIAENLNALLKDADKPSQRIIGAIIGSVALGVATTAQVTAALAMTQAQQNARNIWKLKESIKNTNQAVLELKDGLQQSAIALDKVQSFINSEILPQINQLGCEVAANKLGIFLSLYLTEITTVFKNQITNPALSTLSYQALYNLCGGNMAALTKQIGIKDTEINSLYEAELITGQVIGYDSADQILLIQVSYPSVSRVQGVRAVELLTVSVATPKGEGKAIAPSFIAQSNIIAEELDTQPCKFSKTTLYCRQVNTRTLPVRVANCLKGKYNDCQYTTEIGALASRYVTITNGVVANCRSIICRCLDPEGIVAQNSDAAITVIDRSTCKLIQLGDITLRLEGKLSSSYSKNITIDISQVTTSGSLDISSELGSINNTITKVEDLISKSNDWLSKVNPTLISNDTIIALCVIAGIVVIWLVIITILSYYILIKLKNVALLSTMPKKDLNPYVNNTKF

SEQ ID NO: 33 - protein, 552 aa, Dolphin morbillivirus
  MISC_FEATURE: fusion protein
MAASNGGVMYQSFLTIIILVIMTEGQIHWGNLSKIGIVGTGSASYKVMTRPNHQYLVIKLMPNVTMIDNCTRTEVTEYRKLLKTVLEPVKNALTVITKNIKPIQSLTTSRRSKRFAGVVLAGVALGVATAAQITAGVALHQSIMNSQSIDNLRTSLEKSNQAIEEIRQASQETVLAVQGVQDFINNELIPSMHQLSCEMLGQKLGLKLLRYYTEILSIFGPSLRDPVSAEISIQALSYALGGDINKILEKLGYSGADLLAILESRGIKAKVTHVDLEGYFIVLSIAYPTLSEVKGVIVHKLEAVSYNLGSQEWYTTLPKYVATNGYLISNFDESSCAFMSEVTICSQNALYPMSPLLQQCLRGSTASCARSLVSGTIGNRFILSKGNLIANCASVLCKCYSTGTIISQDPDKLLTFVAADKCPLVEVDGITIQVGSREYPDSVYVSRIDLGPAISLEKLDVGTNLGSALTKLDNAKDLLDSSNQILENVRRSSFGGAMYIGILVCAGALVILCVLVYCCRRHCRKRVQTPPKATPGLKPDLTGTTKSYVRSL

SEQ ID NO: 34 - protein, 552 aa, Mossman virus
  MISC_FEATURE: fusion protein
MSNYFPARVIIIVSLITAVSCQISFQNLSTIGVFKFKEYDYRVSGDYNEQFLAIKMVPNVTGVENCTASLIDEYRHVIYNLLQPINTTLTASTSNVDPYAGNKKFFGAVIAGVALGVATAAQVTAGVALYEARQNAAAIAEIKESLHYTHKAIESLQISQKQTVVAIQGIQDQINTNIIPQINALTCEIANQRLRLMLLQYYTEMLSSFGPIIQDPLSGHITVQALSQAAGGNITGLMRELGYSSKDLRYILSVNGISANIIDADPEIGSIILRIRYPSMIKIPDVAVMELSYLAYHAAGGDWLTVGPRFILKRGYSLSNLDITSCTIGEDFLLCSKDVSSPMSLATQSCLRGDTQMCSRTAVQDREAPRFLLLQGNLIVNCMSVNCKCEDPEETITQDPAYPLMVLGSDTCKIHYIDGIRIKLGKVQLPPITVLNTLSLGPIVVLNPIDVSNQLSLVETTVKESEDHLKNAIGALRSQSRVGGVGIVAIVGLIIATVSLVVLVISGCCLVKYFSRTATLESSLTTIEHGPTLAPKSGPIIPTYINPVYRHD

SEQ ID NO: 35 - protein, 544 aa, J-virus
  MISC_FEATURE: fusion protein
MKPVALIYLTILAFTVKVRSQLALSDLTKIGIIPAKSYELKISTQAAQQLMVIKLIPNVNGLTNCTIPVMDSYKKMLDRILKPIDDALNHVKNAIQDKQGDGVPGVRFWGAIIGGVALGVATSAQITAGVALHNSIQNANAILQLKESIRNSNKAIEELQAGLQSTVLVINALQDQINSQLVPAINTLGCSVIANTLGLRLNQYFSEISLVFGPNLRDPTSQTLSIQAIAKAFNGDFDSMMKKMHYTDSDFLDLLESDSIRGRIISVSLEDYLIIIQIDYPGLTTIPNSVVQTFNLITYNYKGTEWESIFPRELLIRGSYISNIDISQCVGTSKSMICKSDTSTTISPATWACATGNLTSCARTRVVNSHSTRFALSGGVLFANCAPIACRCQDPQYSINQEPKTTNVMVTSEDCKELYIDGFYLTLGKKMLDRAMYAEDVALGGSVSVDPIDIGNELNSINESINKSHEYLDKANELLEQVNPNIVNVSSFSFILVISILLIIWFIVTLVWLIYLTKHMNFIVGKVAMGSRSSTVNSLSGFVG

SEQ ID NO: 36 - protein, 537 aa, Mapuera virus
  MISC_FEATURE: fusion protein
MRSSLFLVLTLLVPFAHSIDSITLEQYGTVITSVRSLAYFLETNPTYISVRLMPAIQTDSSHCSYHSIENYNLTLTKLLLPLQENLHQITDSLSSRRRKKRFAGVAVGLAALGVATAAQVTAAIAVVKAKENSAKIAQLTSAISETNRAVQDLIEGSKQLAVAVQAIQDQINNVIQPQLTNLSCQVADAQVGTILNMYLTELTTVFHPQITNSALTPITIQALRSLLGSTLPQVVTSTIKTDVPLQDLLTSGLLKGQIVYLDLQSMIMVVSVSVPTIALHSMAKVYTLKAISAHVNNAEVQMQVPSRVMELGSEIMGYDIDQCEETSRYLFCPYNGGSILSATMKMCLNGNISQCVFTPIYGSFLQRFVLVDGVIVANCRDMTCACKSPSKIITQPDSLPVTIIDSTSCSNLVLDTLELPIISINNATYRPVQYVGPNQIIFSQPLDLLSQLGKINSSLSDAIEHLAKSDEILEQIQWDSPQGYTLIALTSVLAFVVVAIVGLLISTRYLIFEIRRINTTLTQQLSSYVLSNKIIQY

SEQ ID NO: 37 - protein, 566 aa, Nariva virus
  MISC_FEATURE: fusion protein
MAEQEKTPLRYKILLIIIVINHYNITNVFGQIHLANLSSIGVFVTKTLDYRTTSDPTEQLLVINMLPNISNIQDCAQGVVNEYKHLISSLLTPINDTLDLITSNINPYSGRNKLFGEIIAGAALTVATSAQITAGVALYEARQNAKDIAAIKESLGYAYKAIDKLTTATREITVVINELQDQINNRLIPRINDLACEVWATRLQAMLLQYYAEIFSVIGPNLQDPLSGKISIQALARAAGGNIKLMVDELNYSGQDLSRLVKVGAIKGQIIDADPSLGVVIIKMRYPNIIKIPNVAISELSYVSYSSDGQDWITTGPNYIVTRGYSIANIQTSSCSVGDDFVLCDRDMTYPMSQVTQDCLRGNIALCSRMVVRDREAPRYLILQGNMVANCMSITCRCEEPESEIYQSPDQPLTLLTRDTCDTHVVDGIRIRLGVRKLPTISVINNITLGPIITTDPIDVSNQLNAVVSTIDQSAELLHQAQRVLSERARGARDHILATAAIVICVVLAVLILVLLIGLVYLYRTQNEILVKTTMLEQVPTFAPKSFPMESQIYSGKTNKGYDPAE

SEQ ID NO: 38 - protein, 662 aa, Bat Paramyxovirus Eid_hel/GH-M74a/GHA/2009
  MISC_FEATURE: fusion protein
MKKKTDNPTISKRGHNHSRGIKSRALLRETDNYSNGLIVENLVRNCHHPSKNNLNYTKTQKRDSTIPYRVEERKGHYPKIKHLIDKSYKHIKRGKRRNGHNGNIITIILLLILILKTQMSEGAIHYETLSKIGLIKGITREYKVKGTPSSKDIVIKLIPNVTGLNKCTNISMENYKEQLDKILIPINNIIELYANSTKSAPGNARFAGVIIAGVALGVAAAAQITAGIALHEARQNAERINLLKDSISATNNAVAELQEATGGIVNVITGMQDYINTNLVPQIDKLQCSQIKTALDISLSQYYSEILTVFGPNLQNPVTTSMSIQAISQSFGGNIDLLLNLLGYTANDLLDLLESKSITGQITYINLEHYFMVIRVYYPIMTTISNAYVQELIKISFNVDGSEWVSLVPSYILIRNSYLSNIDISECLITKNSVICRHDFAMPMSYTLKECLTGDTEKCPREAVVTSYVPRFAISGGVIYANCLSTTCQCYQTGKVIAQDGSQTLMMIDNQTCSIVRIEEILISTGKYLGSQEYNTMHVSVGNPVFTDKLDITSQISNINQSIEQSKFYLDKSKAILDKINLNLIGSVPISILFIIAILSLILSIITFVIVMIIVRRYNKYTPLINSDPSSRRSTIQDVYIIPNPGEHSIRSAARSIDRDRD

SEQ ID NO: 39 - protein, 539 aa, Avian paramyxovirus 7
  MISC_FEATURE: fusion protein
MRVRPLIIILVLLVLLWLNILPVIGLDNSKIAQAGIISAQEYAVNVYSQSNEAYIALRTVPYIPPHNLSCFQDLINTYNTTIQNIFSPIQDQITSITSASTLPSSRFAGLVVGAIALGVATSAQITAAVALTKAQQNAQEIIRLRDSIQNTINAVNDITVGLSSIGVALSKVQNYLNDVINPALQNLSCQVSALNLGIQLNLYLTEITTIFGPQITNPSLTPLSIQALYTLAGDNLMQFLTRYGYGETSVSSILESGLISAQIVSFDKQTGIAILYVTLPSIATLSGSRVTKLMSVSVQTGVGEGSAIVPSYVIQQGTVIEEFIPDSCIFTRSDVYCTQLYSKLLPDSILQCLQGSMADCQFTRSLGSFANRFMTVAGGVIANCQTVLCRCYNPVMIIPQNNGIAVTLIDGSLCKELELEGIRLTMADPVFASYSRDLIINGNQFAPSDALDISSELGQLNNSISSATDNLQKAQESLNKSIIPAATSSWLIILLFVLVSISLVIGCISIYFIYKHSTTNRSRNLSSDIISNPYIQKAN

SEQ ID NO: 40 - protein, 539 aa, Tuhoko virus 2
  MISC_FEATURE: fusion protein
MAPCVLFLSSLLLISTISPSHGINQPALRRIGAIVSSVKQLKFYSKTKPNYIIVKLLPTINLSKSNCNLTSINRYKESVIEIIKPLADNIDNLNQKLLPKNRRKRMAGVAIGLAALGVAAAAQATAAVALVEARKNTQMIQSLADSIQDTNAAVQAVNIGLQNSAVAIQAIQNQINNVINPALDRLNCEVLDAQIASILNLYLIKSVTIFQNQLTNPALQQLSIQMLSIVMQDTAKILGNFTIGDKFDQHDLLGSGLITGQVVGVNLTNLQLIIAAFIPSIAPLPQAYIIDLISITISVNDTEAVIQIPERIMEHGSSIYQFGGKQCVYGQFSAYCPFSDAVLMTQDLQLCMKGNIEHCIFSSVLGSFPNRFASVDGVFYANCKYMSCACSDPLQVIHQDDSVNLMVIDSSVCRSLTLGHVTFPIIAFSNVSYQMKTNISIEQMIVTSPLDLSTELKQINNSVNIANTFLDSSNRALKTSIFGTSSQIILIVLLIFTCLLILYVIFLTYIIKILIKEVKRLRDGNSRTGSKLSFINPDV

SEQ ID NO: 41 - protein, 537 aa, Tuhoko virus 3
  MISC_FEATURE: fusion protein
MLWLTILIALVGNHESTCMNINFLQSLGQINSQKRFLNFYTQQPPSYMVIRLVPTLQLSANNCTLGSIVRYRNAIKELIQPMDENLRWLSSNLIPQRRGKRFAGVAVGLAALGVAVAAQATAAVALVEARANAEKIASMSQSIQETNKAVTSLSQAVSASGIAIQAIQNEINNVIHPILNQVQCDVLDARVGNILNLYLIKVTTIFQNQLTNPALQRLSTQALSMLMQSTSSYLRNLSSSESAINADLSMTNLIEAQIVGINMTNLQLVLAVFIPSIARLNGALLYDFISITISSNQTEVMLQIPHRVLEIGNSLYTFEGTQCEMTKLNAYCLYSDAIPVTESLRDCMNGLFSQCGFVRIIGSFANRFASVNGVIYANCKHLTCSCLQPDEIITQDTNVPLTIIDTKRCTKISLGHLTFTIREYANVTYSLRTEIANSQITVVSPLDLSSQLTTINNSLADATNHIMNSDRILDRLNSGLYSKWVIIFLICASIVSLIGLVFLGFLIRGLILELRSKHRSNLNKASTYSIDSSIGLT

SEQ ID NO: 42 - protein, 545 aa, Mojiang virus
  MISC_FEATURE: fusion protein
MALNKNMFSSLFLGYLLVYATTVQSSIHYDSLSKVGVIKGLTYNYKIKGSPSTKLMVVKLIPNIDSVKNCTQKQYDEYKNLVRKALEPVKMAIDTMLNNVKSGNNKYRFAGAIMAGVALGVATAATVTAGIALHRSNENAQAIANMKSAIQNTNEAVKQLQLANKQTLAVIDTIRGEINNNIIPVINQLSCDTIGLSVGIRLTQYYSEIITAFGPALQNPVNTRITIQAISSVFNGNFDELLKIMGYTSGDLYEILHSELIRGNIIDVDVDAGYIALEIEFPNLTLVPNAVVQELMPISYNIDGDEWVTLVPRFVLTRTTLLSNIDTSRCTITDSSVICDNDYALPMSHELIGCLQGDTSKCAREKVVSSYVPKFALSDGLVYANCLNTICRCMDTDTPISQSLGATVSLLDNKRCSVYQVGDVLISVGSYLGDGEYNADNVELGPPIVIDKIDIGNQLAGINQTLQEAEDYIEKSEEFLKGVNPSIITLGSMVVLYIFMILIAIVSVIALVLSIKLTVKGNVVRQQFTYTQHVPSMENINYVSH

SEQ ID NO: 43 - protein, 546 aa, Avian paramyxovirus 12
  MISC_FEATURE: fusion protein
MAIPVPSSTALMIFNILVSLAPASALDGRLLLGAGIVPTGDRQVNVYTSSQTGIIALKLLPNLPKDKENCAEVSIRSYNETLTRILTPLAQSMAAIRGNSTVSTRGREPRLVGAIIGGVALGVATAAQITAATALIQANQNAENIARLAKGLAATNEAVTDLTKGVGSLAIGVGKLQDYVNEQFNRTGEAIECLTIESRVGVQLSLYLTEVIGVFGDQITSPALSDISIQALYNLAGGNLNVLLQKMGIEGTQLGSLINSGLIKGRPIMYDDGNKILGIQVTLPSVGRINGARATLLEAIAVATPKGNASPLIPRAVISVGSLVEELDMTPCVLTPTDIFCTRILSYPLSDSLTTCLKGNLSSCVFSRTEGALSTPYVSVHGKIVANCKSVVCRCVEPQQIISQNYGEALSLIDESLCRILELNGVILKMDGQFTSEYTKNITIDPVQVIISGPIDISSELSQVNQSLDSALENIKESNSYLSKVNVKLISSSAMITYIVITVICLILTFVALVLGIYSYTKIRSQQKTLIWMGNNIARSKEGNRF

SEQ ID NO: 44 - protein, 538 aa, Avian paramyxovirus 3
  MISC_FEATURE: fusion protein
  misc_feature (287)..(287): Xaa can be any naturally occurring amino acid
MASPMVPLLIITVVPALISSQSANIDKLIQAGIIMGSGKELHIYQESGSLDLYLRLLPVIPSNLSHCQSEVITQYNSTVTRLLSPIAKNLNHLLQPRPSGRLFGAVIGSIALGVATSAQISAAIALVRAQQNANDILALKAAIQSSNEAIKQLTYGQEKQLLAISKIQKAVNEQVIPALTALDCAVLGNKLAAQLNLYLIEMTTIFGDQINNPVLTPIPLSYLLRLTGSELNDVLLQQTRSSLSLIHLVSKGLLSGQIIGYDPSVQGIIIRIGLIRTQRIDRSLVFXPYVLPITISSNIATPIIPDCVVKKGVIIEGMLKSNCIELERDIICKTINTYQITKETRACLQGNITMCKYQQSRTQLSTPFITYNGVVIANCDLVSCRCIRPPMIITQVKGYPLTIINRNLCTELSVDNLILNIETNHNFSLNPTIIDSQSRLIATSPLEIDALIQDAQHHAAAALLKVEESNAHLLRVTGLGSSSWHIILILTLLVCTIAWLIGLSIYVCRIKNDDSTDKEPTTQSSNRGIGVGSIQYMT

SEQ ID NO: 45 - protein, 552 aa, Salem virus
  MISC_FEATURE: fusion protein
MNPLNQTLIAKVLGFLLLSSSFTVGQIGFENLTRIGVHQVKQYGYKLAHYNSHQLLLIRMIPTVNGTHNCTHQVITRYREMVREIITPIKGALDIMKKAVSPDLVGARIFGAIVAGAALGIATSAQITAGVALHRTKLNGQEISKLKEAVSLTNEAVEQLQYSQGKSILAIQGIQDFINFNVVPLLEEHTCGIAKLHLEMALMEYFQKLILVFGPNLRDPIGSTIGIQALATLFQNNMFEVSLRLGYAGDDLEDVLQSNSIRANIIEAEPDSGFIVLAIRYPTLTLVEDQVITELAHITFNDGPQEWVATIPQFVTYRGLVLANIDVSTCTFTERNVICARDQTYPMIIDLQLCMRGNIAKCGRTRVTGSTASRFLLKDGNMYANCIATMCRCMSSSSIINQEPSHLTTLIVKETCSEVMIDTIRITLGERKHPPIDYQTTITLGQPIALAPLDVGTELANAVSYLNKSKVLLEHSNEVLSSVSTAHTSLTATIVLGIVVGGLAILIVVMFLFLEAQVIKVQRAMMLCPITNHGYLPNEDLLTRGHSIPTIG

SEQ ID NO: 46 - protein, 551 aa, Avian paramyxovirus 9
  MISC_FEATURE: fusion protein
MGYFHLLLILTAIAISAHLCYTTTLDGRKLLGAGIVITEEKQVRVYTAAQSGTIVLRSFRVVSLDRYSCMESTIESYNKTVYNILAPLGDAIRRIQASGVSVERIREGRIFGAILGGVALGVATAAQITAAIALIQANENAKNILRIKDSITKTNEAVRDVTNGVSQLTIAVGKLQDFVNKEFNKTTEAINCVQAAQQLGVELSLYLTEITTVFGPQITSPALSKLTIQALYNLAGVSLDVLLGRLGADNSQLSSLVSSGLITGQPILYDSESQILALQVSLPSISDLRGVRATYLDTLAVNTAAGLASAMIPKVVIQSNNIVEELDTTACIAAEADLYCTRITTFPIASAVSACILGDVSQCLYSKTNGVLTTPYVAVKGKIVANCKHVTCRCVDPTSIISQNYGEAATLIDDQLCKVINLDGVSIQLSGTFESTYVRNVSISANKVIVSSSIDISNELENVNSSLSSALEKLDESDAALSKVNVHLTSTSAMATYIVLTVIALILGFVGLGLGCFAMIKVKSQAKTLLWLGAHADRSYILQSKPAQSST

SEQ ID NO: 47 - protein, 533 aa, Achimota virus 1
  MISC_FEATURE: fusion protein
MWIMIILSLFQIIPGVTPINSKVLTQLGVITKHTRQLKFYSHSTPSYLVVKLVPTINTESTVCNFTSLSRYKDSVRELITPLAKNIDNLNSILTIPKRRKRMAGVVIGLAALGVAAAAQATAAVALIEAKKNTEQIQALSESIQNTNKAVSSIEKGLSSAAIAVQAIQNQINNVINPALTALDCGVTDAQLGNILNLYLIKTLTVFQKQITNPALQPLSIQALNIIMQETSSVLRNFTKTDEIEHTDLLTSGLITGQVVGVNLTNLQLIIAAFIPSIAPLNQAYILDFIRITVNINNSESMIQIPERIMEHGISLYQFGGDQCTFSDWSAYCPYSDATLMAPGLQNCFRGQAADCVFSTVMGSFPNRFVSVQGVFYVNCKFIRCACTQPQRLITQDDSLSLTQIDAKTCRMLTLGFVQFSINEYANVTYSFKNNVTAGQLIMTNPIDLSTEIKQMNDSVDEAARYIEKSNAALNKLMYGGRSDIVTTVLLVGFILLVVYVIFVTYILKILMKEVARLRNSNHPDLIKPYNYPM

SEQ ID NO: 48 - protein, 531 aa, Achimota virus 2
  MISC_FEATURE: fusion protein
MLNSFYQIICLAVCLTTYTVISIDQHNLLKAGVIVKSIKGLNFYSRGQANYIIVKLIPNVNVTDTDCDIGSIKRYNETVYSLIKPLADNIDYLRTQFAPTKRKKRFAGVAIGLTALGVATAAQVTAAVALVKAQENARKLDALADSIQATNEAVQDLSTGLQAGAIAIQAIQSEINHVINPALERLSCEIIDTRVASILNLYLIRLTTVFHRQLVNPALTPLSIQALNHLLQGETEGLVKNESKMTDSKIDLLMSGLITGQVVGVNIKHMQLMIAVFVPTTAQLPNAYVINLLTITANINNSEVLVQLPNQILERSGIIYQFRGKDCVSSPNHMYCPYSDASILSPELQLCLQGRLEMCLFTQVVGSFPTRFASDKGIVYANCRHLQCACSEPEGIIYQDDTSAITQIDASKCSTLKLDMLTFKLSTYANKTFDASFSVGKDQMLVTNLLDLSAELKTMNASVAHANKLIDKSNLLIQSNALIGHSNTIFIVVIVILAVMVLYLIIVTYIIKVIMVEVSRLKRMNIYSIDK

SEQ ID NO: 49 - protein, 532 aa, Tuhoko virus 1
  MISC_FEATURE: fusion protein
MVTIIKPLILLVTVILQISGHIDTTALTSIGAVIASSKEIMYYAQSTPNYIVIKLIPNLPNIPSQCNFSSIAYYNKTLLDLFTPISDNINMLHQRLSNTGRNRRFAGVAIGLAALGVATAAQVTAAFALVEAKSNTAKIAQIGQAIQNTNAAINSLNAGIGGAVTAIQAIQTQINGIITDQINAATCTALDAQIGTLLNMYLLQLTTTFQPQIQNPALQPLSIQALHRIMQGTSIVLSNLTDSSKYGLNDALSAGLITGQIVSVDLRLMQITIAANVPTLSRLENAIAHDIMRITTNVNNTEVIVQLPETIMEHAGRLYQFNKDHCLSSTQRFFCPYSDAKLLTSKISSCLSGIRGDCIFSPVVGNFATRFISVKGVIIANCKFIRCTCLQPEGIISQLDDHTLTVIDLKLCNKLDLGLIQFDLQVLSNISYEMTLNTSQNQLILTDPLDLSSELQTMNQSINNAANFIEKSNSLLNSSTYEFNRSVALLVALILLSLTILYVIVLTCVVKLLVHEVSKNRRHIQDLESHHK

SEQ ID NO: 50 - protein, 631 aa, Phocine distemper virus
  MISC_FEATURE: fusion protein
MTRVKKLPVPTNPPMHHSLDSPFLNPEHATGKISITDDTSSQLTNFLYHKYHKTTINHLSRTISGTDPPSAKLNKFGSPILSTYQIRSALWWIAMVILVHCVMGQIHWTNLSTIGIIGTDSSHYKIMTRSSHQYLVLKLMPNVSIIDNCTKAELDEYEKLLNSVLEPINQALTLMTKNVKSLQSLGSGRRQRRFAGVVIAGAALGVATAAQITAGVALYQSNLNAQAIQSLRASLEQSNKAIDEVRQASQNIIIAVQGVQDYVNNEIVPALQHMSCELIGQRLGLKLLRYYTELLSVFGPSLRDPVSAEISIQALSYALGGEIHKILEKLGYSGNDMVAILETKGIRAKITHVDLSGKFIVLSISYPTLSEVKGVVVHRLEAVSYNIGSQEWYTTVPRYVATNGYLISNFDESSCVFVSESAICSQNSLYPMSPILQQCLRGETASCARTLVSGTLGNKFILSKGNIIANCASILCKCHSTSKIINQSPDKLLTFIASDTCSLVEIDGVTIQVGSRQYPDVVYASKVILGPAISLERLDVGTNLGSALKKLNDAKVLIESSDQILDTVKNSYLSLGTLIALPVSIGLGLILLLLICCCKKRYQHLFSQSTKVAPVFKPDLTGTSKSYVRSL

SEQ ID NO: 51 - protein, 541 aa, Caprine parainfluenza virus 3
  MISC_FEATURE: fusion protein
MIKKIICIFSMPILLSFCQVDIIKLQRVGILVSKPKSIKISQNFETRYLVLNLIPNIENAQSCGDQQIKQYKKLLDRLIIPLYDGLRLQQDIIVVDNNLKNNTNHRAKRFFGEIIGTIALGVATSAQITAAVALVEAKQARSDIERVKNAVRDTNKAVQSIQGSVGNLIVAVKSVQDYVNNEIVPSIKRLGCEAAGLQLGIALTQHYSELTNIFGDNIGTLKEKGIKLQGIASLYHTNITEIFTTSTVDQYDIYDLLFTESIKMRVIDVDLNDYSITLQVRLPLLTKISDAQIYNVDSVSYNIGGTEWYIPLPRNIMTKGAFLGGANLQDCIESFSDYICPSDPGFILNRDIENCLSGNITQCPKTLVISDIVPRYAFVDGGVIANCLSTTCTCNGIDNRINQAPDQGIKIITYKDCQTIGINGMLFKTNQEGTLAAYTPVDITLNNSVNLDPIDLSIELNRARSDLAESKEWIKRSEAKLDSVGSWYQSSTTEIIQIVMIIVLFIINIIVLIVLIKYSRSQNQSMNNHMNEPYILTNKVQ

SEQ ID NO: 52 - protein, 553 aa, Tupaia paramyxovirus
  MISC_FEATURE: fusion protein
MASLLKTICYIYLITYAKLEPTPKSQLDLDSLASIGVVDAGKYNYKLMTTGSEKLMVIKLVPNITYATNCNLTAHTAYTKMIERLLTPINQSLYEMRSVITERDGGTIFWGAIIAGAALGVATAAAITAGVALHRAEQNARNIAALKDALRNSNEAIQHLKDAQGHTVLAIQGLQEQINNNIIPKLKESHCLGVNNQLGLLLNQYYSEILTVFGPNLQNPVSASLTIQAIAKAFNGDFNSLMTNLNYDPTDLLDILESNSINGRIIDVNLNEKYIALSIEIPNFITLTDAKIQTFNRITYGYGSNEWLTLIPDNILEYGNLISNVDLTSCVKTKSSYICNQDTSYPISSELTRCLRGDTSSCPRTPVVNSRAPTFALSGGHIYANCAKAACRCEKPPMAIVQPATSTLTFLTEKECQEVVIDQINIQLAPNRLNKTIITDGIDLGPEVIINPIDVSAELGNIELEMDKTQKALDRSNKILDSMITEVTPDKLLIAMIVVFGILLLWLFGVSYYAFKIWSKLHFLDSYVYSLRNPSHHRSNGHQNHSFSTDISG

SEQ ID NO: 53 - protein, 543 aa, Avian paramyxovirus 3
  MISC_FEATURE: fusion protein
MQPGSALHLPHLYIIIALVSDGTLGQTAKIDRLIQAGIVLGSGKELHISQDSGTLDLFVRLLPVLPSNLSHCQLEAITQYNKTVTRLLAPIGKNLEQVLQARPRGRLFGPIIGSIALGVATSAQITAAIALVRAQQNANDILALKNALQSSNEAIRQLTYGQDKQLLAISKIQKAVNEQILPALDQLDCAVLGTKLAVQLNLYLIEMTTIFGEQINNPVLATIPLSYILRLTGAELNNVLMKQARSSLSLVQLVSKGLLSGQVIGYDPSVQGLIIRVNLMRTQKIDRALVYQPYVLPITLNSNIVTPIAPECVIQKGTIIEGMSRKDCTELEQDIICRTVTTYTLARDTRLCLQGNISSCRYQQSGTQLHTPFITYNGAVIANCDLVSCRCLRPPMIITQVKGYPLTIITRSVCQELSVDNLVLNIETHHNFSLNPTIIDPLTRVIATTPLEIDSLIQEAQDHANAALAKVEESDKYLRAVTGGNYSNWYIVLVIVLLFGNLGWSLLLTVLLCRSRKQQRRYQQDDSVGSERGVGVGTIQYMS

SEQ ID NO: 54 - protein, 541 aa, Avian paramyxovirus 14
  MISC_FEATURE: fusion protein
MEKGTVLFLAALTLYNVKALDNTKLLGAGIASGKEHELKIYQSSVNGYIAVKLIPFLPSTKRECYNEQLKNYNATINRLMGPINDNIKLVLSGVKTRTREGKLIGAIIGTAALGLATAAQVTAAIALEQAQDNARAILTLKESIRNTNNAVSELKTGLSEVSIALSKTQDYINTQIMPALSNLSCEIVGLKIGIQLSQYLTEVTAVFGNQITNPALQPLSMQALYQLCGGDFSLLLDKIGADRNELESLYEANLVTGRIVQYDTADQLVIIQVSIPSVSTLSGYRVTELQSISVDMDHGEGKAVIPRYIVTSGRVIEEMDISPCVLTATAVYCNRLLTTSLPESVLKCLDGDHSSCTYTSNSGVLETRYIAFDGMLIANCRSIVCKCLDPPYIIPQNKGKPLTIISKEVCKKVTLDGITLLIDAEFTGEYGLNITIGPDQFAPSGALDISTELGKLNNSINKAEDYIDKSNELLNRVNVDIVNDTAVIVLCVMSALVVVWCIGLTVGLIYVSKNTLRAVAIKGTSIENPYVSSGKHAKNSS

SEQ ID NO: 55 - protein, 551 aa, Avian paramyxovirus UPO216
  MISC_FEATURE: fusion protein
MIFTMYHVTVLLLLSLLTLPLGIQLARASIDGRQLAAAGIVVTGEKAINLYTSSQTGTIVVKLLPNVPQGREACMRDPLTSYNKTLTSLLSPLGEAIRRIHESTTETAGLVQARLVGAIIGSVALGVATSAQITAAAALIQANKNAENILKLKQSIAATNEAVHEVTDGLSQLAVAVGKMQDFINTQFNNTAQEIDCIRISQQLGVELNLYLTELTTVFGPQITSPALSPLSIQALYNLAGGNLDVLLSKIGVGNNQLSALISSGLISGSPILYDSQTQLLGIQVTLPSVSSLNNMRAIFLETLSVSTDKGFAAALIPKVVTTVGTVTEELDTSYCIETDIDLFCTRIVTFPMSPGIYACLNGNTSECMYSKTQGALTTPYMSVKGSIVANCKMTTCRCADPASIISQNYGEAVSLIDSSVCRVITLDGVTLRLSGSFDSTYQKNITIRDSQVIITGSLDISTELGNVNNSINNALDKIEESNQILESVNVSLTSTNALIVYIICTALALICGITGLILSCYIMYKMRSQQKTLMWLGNNTLDQMRAQTKM

SEQ ID NO: 56 - protein, 552 aa, Atlantic salmon paramyxovirus
  MISC_FEATURE: fusion protein
MDGPKFRFVLLILLTAPARGQVDYDKLLKVGIFEKGTANLKISVSSQQRYMVIKMMPNLGPMNQCGIKEVNLYKESILRLITPISTTLNYIKSEIQVEREVALQPNGTIVRFFGLIVAAGALTLATSAQITAGIALHNSLENAKAIKGLTDAIKESNLAIQKIQDATAGTVIALNALQDQVNTNIIPAINTLGCTAAGNTLGIALTRYYSELIMIFGPSLGNPVEAPLTIQALAGAFNGDLHGMIREYGYTPSDIEDILRTNSVTGRVIDVDLVGMNIVLEINLPTLYTLRDTKIVNLGKITYNVDGSEWQTLVPEWLAIRNTLMGGVDLSRCVVSSRDLICKQDPVFSLDTSIISCLNGNTESCPRNRVVNSVAPRYAVIRGNILANCISTTCLCGDPGVPIIQKGDNTLTAMSINDCKLVGVDGYVFRPGPKAVNVTFNLPHLNLGPEVNVNPVDISGALGKVEQDLASSRDHLAKSEKILSGINPNIINTEMVLVAVILSLVCAMVVIGIVCWLSILTKWVRSCRADCRRPNKGPDLGPIMSSQDNLSF

SEQ ID NO: 57 - protein, 321 aa, Human respiratory syncytial virus
  MISC_FEATURE: attachment glycoprotein
MSKTKDQRTAKTLERTWDTLNHLLFISSCLYKLNLKSIAQITLSILAMIISTSLIIAAIIFIASANHKVTLTTAIIQDATNQIKNTTPTYLTQNPQLGISFSNLSGTTLQSTTILASTTPSAESTPQSTTVKIINTTTTQILPSKPTTKQRQNKPQNKPNNDFHFEVFNFVPCSICSNNPTCWAICKRIPNKKPGKKTTTKPTKKPTLKTTKKDPKPQTTKPKEALTTKPTGKPTINTTKTNIRTTLLTSNTKGNPEHTSQEETLHSTTSEGYLSPSQVYTTSGQEETLHSTTSEGYLSPSQVYTTSEYLSQSLSSSNTTK

SEQ ID NO: 58 - protein, 616 aa, Newcastle disease virus
  MISC_FEATURE: hemagglutinin-neuraminidase protein
MERGVSQVALENDEREAKNTWRLVFRVTVLFLTIVTLAISAAALAFSMNASTPQDLEGIPVAISKVEDKITSALGASQDVMDRIYKQVALESPLALLNTESTIMNALTSLSYQINGAANASGCGAPVPDPDYIGGIGKELIVDDTSDVTSFYPSAFQEHLNFIPAPTTGSGCTRIPSFDMSATHYCYTHNVILSGCRDHSHSHQYLALGVLRTSATGRVFFSTLRSINLDDTQNRKSCSVSATPLGCDMLCSKVTETEEEDYQSTDPTLMVHGRLGFDGQYHERDLDVHTLFGDWVANYPGVGGGSFINNRVWFPVYGGLKPGSPTDKRQEGQYAIYKRYNDTCPDDQEYQVRMAKSAYKPNRFGGKRVQQAILSIGVSTTLADDPVLTVTSNTITLMGAEGRVMTVGTSHYLYQRGSSYYSPAILYPLTIANKTATLQDPYKFNAFTRPGSVPCQASARCPNSCVTGVYTDPYPIVFHKNHTLRGVFGTMLDDEQARLNPVSAVFDSIARSRVTRVSSSSTKAAYTTSTCFKVVKTGKVYCLSIAEISNTLFGEFRIVPLLVEILRDEGRSEARSALTTQGHPGWNDEVVDPIFCAVTNQTDHRQKLEEYAQSWP

SEQ ID NO: 59 - protein, 316 aa, Human respiratory syncytial virus
  MISC_FEATURE: receptor-binding glycoprotein
MSKNKNQRTARTLEKTWDTLNHLIVISSCLYKLNLKSIAQIALSVLAMIISTSLIIAAIIFIISANHKVTLTTVTVQTIKNHTEKNITTYLTQVSPERVSPSKQPTTTPPIHTNSATISPNTKSETHHTTAQTKGRTTTPTQNNKPSTKPRPKNPPKKPKDDYHFEVFNFVPCSICGNNQLCKSICKTIPNNKPKKKPTTKPTNKPPTKTTNKRDPKTPAKTLKKETTINPTTKKPTPKTTERDTSTPQSTVLDTTTSKHTERDTSTPQSTVLDTTTSKHTIQQQSLHSITPENTPNSTQTPTASEPSTSNSTQKL

SEQ ID NO: 60 - protein, 621 aa, Measles virus
  MISC_FEATURE: Hemagglutinin
MSPHRDRINAFYRDNPHPKGSRIVINREHLMIDRPYVLLAVLFVMFLSLIGLLAIAGIRLHRAAIYTAEIHKSLSTNLDVTNSIEHQVKDVLTPLFKIIGDEVGLRTPQRFTDLVKFISDKIKFLNPDREYDFRDLTWCINPPERIKLDYDQYCADVAAEELMNALVNSTLLEARATNQFLAVSKGNCSGPTTIRGQFSNMSLSLLDLYLSRGYNVSSIVTMTSQGMYGGTYLVGKPNLSSKGSELSQLSMHRVFEVGVIRNPGLGAPVFHMTNYFEQPVSNDFSNCMVALGELRFAALCHREDSVTVPYQGSGKGVSFQLVKLGVWKSPTDMQSWVPLSTDDPVIDRLYLSSHRGVIADNQAKWAVPTTRTDDKLRMETCFQQACKGKNQALCENPEWAPLKDNRIPSYGVLSVNLSLTVELKIKIASGFGPLITHGSGMDLYKTNHDNVYWLTIPPMKNLALGVINTLEWIPRFKVSPNLFTVPIKEAGEDCHAPTYLPAEVDGDVKLSSNLVILPGQDLQYVLATYDTSRVEHAVVYYVYSPSRSFSYFYPFRLPIKGVPIELQVECFTWDQKLWCRHFCVLADSESGGHITHSGMVGMGVSCTVTREDGTNRRQGCQ

SEQ ID NO: 61 - protein, 582 aa, Mumps virus
  MISC_FEATURE: hemagglutinin-neuraminidase
MEPSKLFTMSDNATFAPGPVINAADKKTFRTCFRILVLSVQAVTLILVIVTLGELVRMINDQGLSNQLSSIADKIRESATMIASAVGVMNQVIHGVTVSLPLQIEGNQNQLLSTLATICTGKKQVSNCSTNIPLVNDLRFINGINKFIIEDYATHDFSIGHPLNMPSFIPTATSPNGCTRIPSFSLGKTHWCYTHNVINANCKDHTSSNQYISMGILVQTASGYPMFKTLKIQYLSDGLNRKSCSIATVPDGCAMYCYVSTQLETDDYAGSSPPTQKLTLLFYNDTVTERTISPTGLEGNWATLVPGVGSGIYFENKLIFPAYGGVLPNSSLGVKSAREFFRPVNPYNPCSGPQQDLDQRALRSYFPSYFSNRRVQSAFLVCAWNQILVTNCELVVPSNNQTLMGAEGRVLLINNRLLYYQRSTSWWPYELLYEISFTFTNSGQSSVNMSWIPIYSFTRPGSGNCSGENVCPTACVSGVYLDPWPLTPYSHQSGINRNFYFTGALLNSSTTRVNPTLYVSALNNLKVLAPYGNQGLFASYTTTTCFQDTGDASVYCVYIMELASNIVGEFQILPVLTRLTIT

SEQ ID NO: 62 - protein, 572 aa, Human respirovirus 3
  MISC_FEATURE: hemagglutinin-neuraminidase
MEYWKHTNHGKDAGNELETATATHGNRLTNKITYILWTITLVLLSIVFIIVLINSIKSEKAHESLLQDINNEFMEVTEKIQVASDNTNDLIQSGVNTRLLTIQSHVQNYIPISLTQQISDLRKFISEITIRNDNQEVPPQRITHDVGIKPLNPDDFWRCTSGLPSLMRTPKIRLMPGPGLLAMPTTVDGCVRTPSLVINDLIYAYTSNLITRGCQDIGKSYQVLQIGIITVNSDLVPDLNPRISHTFNINDNRKSCSLALLNTDVYQLCSTPKVDERSDYASSGIEDIVLDIVNYDGSISTTRFKNNNISFDQPYAALYPSVGPGIYYKGKIIFLGYGGLEHPINENAICNTTGCPGKTQRDCNQASHSPWFSDRRMVNSIIVVDKGLNSVPKLKVWTISMRQNYWGSEGRLLLLGNKIYIYTRSTSWHSKLQLGIIDITDYSDIRIKWTWHNVLSRPGNNECPWGHSCPDGCITGVYTDAYPLNPTGSIVSSVILDSQKSRVNPVITYSTATERVNELAIRNKTLSAGYTTTSCITHYNKGYCFHIVEINHKSLNTFQPMLFKTEIPKSCS

SEQ ID NO: 63 - protein, 220 aa, Human metapneumovirus
  MISC_FEATURE: attachment glycoprotein G
MEVKVENIRAIDMLKARVKNRVARSKCFKNASLILIGITTLSIALNIYLIINYTIQKTTSESEHHTSSPPTESNKETSTIPIDNPDITPNSQHPTQQSTESLTLYPASSMSPSETEPASTPGITNRLSLADRSTTQPSESRTKTNSTVHKKNKKNISSTISRTQSPPRTTAKAVSRTTALRMSSTGERPTTTSVQSDSSTTAQNHEETGPANPQASVSTM

SEQ ID NO: 64 - protein, 607 aa, Canine distemper virus
  MISC_FEATURE: hemagglutinin
MLSYQDKVGAFYKDNARANSSKLSLVTEEQGGRRPPYLLFVLLILLVGILALLAIAGVRFRQVSTSNVEFGRLLKDDLEKSEAVHHQVMDVLTPLFKIIGDEIGLRLPQKLNEIKQFILQKTNFFNPNREFDFRDLHWCINPPSKIKVNFTNYCDAIGVRKSIASAANPILLSALSGGRGDIFPPYRCSGATTSVGRVFPLSVSLSMSLISKTSEIISMLTAISDGVYGKTYLLVPDYIEREFDTQKIRVFEIGFIKRWLNDMPLLQTTNYMVLPENSKAKVCTIAVGELTLASLCVDESTVLLYHDSNGSQDSILVVTLGIFGATPMNQVEEVIPVAHPSVERIHITNHRGFIKDSVATWMVPALVSEQQEGQKNCLESACQRKSYPMCNQTSWEPFGGVQLPSYGRLTLPLDASIDLQLNISFTYGPVILNGDGMDYYENPLLDSGWLTIPPKNGTILGLINKASRGDQFTVTPHVLTFAPRESSGNCYLPIQTSQIMDKDVLTESNLVVLPTQNFRYVVATYDISRENHAIVYYVYDPIRTISYTYPFRLTTKGRPDFLRIECFVWDDDLWCHQFYRFESDITNSTTSVEDLVRIRFSCNRSKP

SEQ ID NO: 65 - protein, 609 aa, Peste-des-petits-ruminants virus
  MISC_FEATURE: haemagglutinin
MSAQRERINAFYKDNPHNKNHRVILDRERLVIERPYILLGVLLVMFLSLIGLLAIAGIRLHRATVGTSEIQSRLNTNIELTESIDHQTKDVLTPLFKIIGDEVGIRIPQKFSDLVKFISDKIKFLNPDREYDFRDLRWCMNPPERVKINFDQFCEYKAAVKSIEHIFESPLNKSKKLQSLTLGPGTGCLGRTVTRAHFSELTLTLMDLDLEMKHNVSSVFTVVEEGLFGRTYTVWRSDARDPSTDLGIGHFLRVFEIGLVRDLGLGPPVFHMTNYLTVNMSDDYRRCLLAVGELKLTALCSSSETVTLGERGVPKREPLVVVILNLAGPTLGGELYSVLPTSDLMVEKLYLSSHRGIIKDDEANWVVPSTDVRDLQNKGECLVEACKTRPPSFCNGTGSGPWSEGRIPAYGVIRVSLDLASDPGVVITSVFGPLIPHLSGMDLYNNPFSRAVWLAVPPYEQSFLGMINTIGFPNRAEVMPHILTTEIRGPRGRCHVPIELSRRVDDDIKIGSNMVILPTIDLRYITATYDVSRSEHAIVYYIYDTGRSSSYFYPVRLNFKGNPLSLRIECFPWRHKVWCYHDCLIYNTITDEEVHTRGLTGIEVTCNPV

SEQ ID NO: 66 - protein, 575 aa, Sendai virus
  MISC_FEATURE: hemagglutinin-neuraminidase protein
MDGDRSKRDSYWSTSPGGSTTKLVSDSERSGKVDTWLLILAFTQWALSIATVIICIVIAARQGYSMERYSMTVEALNTSNKEVKESLTSLIRQEVITRAANIQSSVQTGIPVLLNKNSRDVIRLIEKSCNRQELTQLCDSTIAVHHAEGIAPLEPHSFWRCPAGEPYLSSDPEVSLLPGPSLLSGSTTISGCVRLPSLSIGEAIYAYSSNLITQGCADIGKSYQVLQLGYISLNSDMFPDLNPVVSHTYDINDNRKSCSVVATGTRGYQLCSMPIVDERTDYSSDGIEDLVLDILDLKGRTKSHRYSNSEIDLDHPFSALYPSVGSGIATEGSLIFLGYGGLTTPLQGDTKCRIQGCQQVSQDTCNEALKITWLGGKQVVSVLIQVNDYLSERPRIRVTTIPITQNYLGAEGRLLKLGDQVYIYTRSSGWHSQLQIGVLDVSHPLTISWTPHEALSRPGNEDCNWYNTCPKECISGVYTDAYPLSPDAANVATVTLYANTSRVNPTIMYSNTTNIINMLRIKDVQLEAAYTTTSCITHFGKGYCFHIIEINQKSLNTLQPMLFKTSIPKLCKAES

SEQ ID NO: 67 - protein, 575 aa, Human parainfluenza virus 1 strain Washington/1964
  MISC_FEATURE: HN glycoprotein
MAEKGKTNSSYWSTTRNDNSTVNTHINTPAGRTHIWLLIATTMHTVLSFIIMILCIDLIIKQDTCMKTNIMTVSSMNESAKIIKETITELIRQEVISRTINIQSSVQSGIPILLNKQSRDLTQLIEKSCNRQELAQICENTIAIHHADGISPLDPHDFWRCPVGEPLLSNNPNISLLPGPSLLSGSTTISGCVRLPSLSIGDAIYAYSSNLITQGCADIGKSYQVLQLGYISLNSDMYPDLNPVISHTYDINDNRKSCSVIAAGTRGYQLCSLPTVNETTDYSSEGIEDLVFDILDLKGKTKSHRYKNEDITFDHPFSAMYPSVGSGIKIENTLIFLGYGGLTTPLQGDTKCVINRCTNVNQSVCNDALKITWLKKRQVVNVLIRINNYLSDRPKIVVETIPITQNYLGAEGRLLKLGKKIYIYTRSSGWHSNLQIGSLDINNPMTIKWAPHEVLSRPGNQDCNWYNRCPRECISGVYTDAYPLSPDAVNVATTTLYANTSRVNPTIMYSNTSEIINMLRLKNVQLEAAYTTTSCITHFGKGYCFHIVEINQASLNTLQPMLFKTSIPKICKITS

SEQ ID NO: 68 - protein, 240 aa, Human metapneumovirus
  MISC_FEATURE: attachment glycoprotein G
MEVRVENIRAIDMFKAKMKNRIRSSKCYRNATLILIGLTALSMALNIFLIIDYATLKNMTKVEHCVNMPPVEPSKKSPMTSAADLNTKLNPQQATQLTTEDSTSLAATSENHLHTETTPTSDATISQQATDEHTTLLRPINRQTTQTTTEKKPTGATTKKDKEKETTTRTTSTAATQTLNTTNQTSNGREATTTSARSRNGATTQNSDQTIQAADPSSKPYHTQTNTTTAHNTDTSSLSS

SEQ ID NO: 69 - protein, 604 aa, Hendra virus
  MISC_FEATURE: glycoprotein
MMADSKLVSLNNNLSGKIKDQGKVIKNYYGTMDIKKINDGLLDSKILGAFNTVIALLGSIIIIVMNIMIIQNYTRTTDNQALIKESLQSVQQQIKALTDKIGTEIGPKVSLIDTSSTITIPANIGLLGSKISQSTSSINENVNDKCKFTLPPLKIHECNISCPNPLPFREYRPISQGVSDLVGLPNQICLQKTTSTILKPRLISYTLPINTREGVCITDPLLAVDNGFFAYSHLEKIGSCTRGIAKQRIIGVGEVLDRGDKVPSMFMTNVWTPPNPSTIHHCSSTYHEDFYYTLCAVSHVGDPILNSTSWTESLSLIRLAVRPKSDSGDYNQKYIAITKVERGKYDKVMPYGPSGIKQGDTLYFPAVGFLPRTEFQYNDSNCPIIHCKYSKAENCRLSMGVNSKSHYILRSGLLKYNLSLGGDIILQFIEIADNRLTIGSPSKIYNSLGQPVFYQASYSWDTMIKLGDVDTVDPLRVQWRNNSVISRPGQSQCPRFNVCPEVCWEGTYNDAFLIDRLNWVSAGVYLNSNQTAENPVFAVFKDNEILYQVPLAEDDTNAQKTITDCFLLENVIWCISLVEIYDTGDSVIRPKLFAVKIPAQCSES

SEQ ID NO: 70 - protein, 602 aa, Nipah virus
  MISC_FEATURE: attachment glycoprotein
MPAENKKVRFENTTSDKGKIPSKVIKSYYGTMDIKKINEGLLDSKILSAFNTVIALLGSIVIIVMNIMIIQNYTRSTDNQAVIKDALQGIQQQIKGLADKIGTEIGPKVSLIDTSSTITIPANIGLLGSKISQSTASINENVNEKCKFTLPPLKIHECNISCPNPLPFREYRPQTEGVSNLVGLPNNICLQKTSNQILKPKLISYTLPVVGQSGTCITDPLLAMDEGYFAYSHLERIGSCSRGVSKQRIIGVGEVLDRGDEVPSLFMTNVWTPPNPNTVYHCSAVYNNEFYYVLCAVSTVGDPILNSTYWSGSLMMTRLAVKPKSNGGGYNQHQLALRSIEKGRYDKVMPYGPSGIKQGDTLYFPAVGFLVRTEFKYNDSNCPITKCQYSKPENCRLSMGIRPNSHYILRSGLLKYNLSDGENPKVVFIEISDQRLSIGSPSKIYDSLGQPVFYQASFSWDTMIKFGDVLTVNPLVVNWRNNTVISRPGQSQCPRFNTCPEICWEGVYNDAFLIDRINWISAGVFLDSNQTAENPVFTVFKDNEILYRAQLASEDTNAQKTITNCFLLKNKIWCISLVEIYDTGDNVIRPKLFAVKIPEQCT

SEQ ID NO: 71 - protein, 572 aa, Swine parainfluenza virus 3
  MISC_FEATURE: hemagglutinin-neuraminidase HN
MEYWKHTNSTKDTNNELGTTRDRHSSKATNIIMYIFWTTTSTILSVIFIMILINLIQENNHNKLMLQEIKKEFAVIDTKIQKTSDDISTSIQSGINTRLLTIQSHVQNYIPLSLTQQMSDLRKFINDLTTKREHQEVPIQRMTHDSGIEPLNPDKFWRCTSGNPSLTSSPKIRLIPGPGLLATSTTVNGCIRIPSLAINNLIYAYTSNLITQGCQDIGKSYQVLQIGIITINSDLVPDLNPRVTHTFNIDDNRKSCSLALLNTDVYQLCSTPKVDERSDYASTGIEDIVLDIVTSNGLIITTRFTNNNITFDKPYAALYPSVGPGIYYKDKVIFLGYGGLEHEENGDVICNTTGCPGKTQRDCNQASYSPWFSNRRMVNSIIVVDKSIDTTFSLRVWTIPMRQNYWGSEGRLLLLGDRIYIYTRSTSWHSKLQLGVIDISDYNNIRINWTWHNVLSRPGNDECPWGHSCPDGCITGVYTDAYPLNPSGSVVSSVILDSQKSRENPIITYSTATNRVNELAIYNRTLPAAYTTTNCITHYDKGYCFHIVEINHRSLNTFQPMLFKTEVPKNCS

SEQ ID NO: 72 - protein, 231 aa, Human metapneumovirus
  MISC_FEATURE: attachment glycoprotein G
MEVRVENIRAIDMFKAKIKNRIRSSRCYRNATLILIGLTALSMALNIFLIIDHATLRNMIKTENCANMPSAEPSKKTPMTSTAGPSTKPNPQQATQWTTENSTSPAATLEGHPYTGTTQTPDTTAPQQTTDKHTALPKSTNEQITQTTTEKKTTRATTQKREKRKENTNQTTSTAATQTTNTTNQTRNASETITTSDGPRIDTTTQSSEQTARATEPGSSPYHARRGAGPR

SEQ ID NO: 73 - protein, 595 aa, Feline morbillivirus
  MISC_FEATURE: hemagglutinin protein
MKNINIKYYKDSNRYLGKILDEHKIVNSQLYSLSIKVITIIAIIVSLIATIMTIINATSGRTTLNSNTDILLNQRDEIHSIHEMIFDRVYPLITAMSTELGLHIPTLLDELTKAIDQKIKIMNPPVDTVTSDLSWCIKPPNGIIIDPKGYCESMELSKTYKLLLDQLDVSRKKSLTINRKNINQCQLVDDSEIIFATVNIQSTPRFLNFGHTVSNQRITFGQGTYSSTYILTIQEDGITDVQYRVFEIGYISDQFGVFPSLIVSRVLPIRMVLGMESCTLTSDRQGGYFLCMNTLTRSIYDYVNIRDLKSLYITLPHYGKVNYTYFNFGKIRSPHEIDKLWLTSDRGQIISGYFAAFVTITIRNYNNYPYKCLNNPCFDNSENYCRGWYKNITGTDDVPILAYLLVEMYDEEGPLITLVAIPPYNYTAPSHNSLYYDDKINKLIMTTSHIGYIQINEVHEVIVGDNLKAILLNRLSDEHPNLTACRLNQGIKEQYKSDGMIISNSALIDIQERMYITVKAIPPVGNYNFTVELHSRSNTSYILLPKQFNAKYDKLHLECFNWDKSWWCALIPQFSLSWNESLSVDTAIFNLINCK

SEQ ID NO: 74 - protein, 613 aa, Avian paramyxovirus 6
  MISC_FEATURE: hemagglutinin-neuraminidase
MASPSELNRSQATLYEGDPNSKRTWRTVYRASTLILDLAILCVSIVAIVRMSTLTPSDVTDSISSSITSLSDTYQSVWSDTHQKVNSIFKEVGISIPVTLDKMQVEMGTAVNIITDAVRQLQGVNGSAGFSITNSPEYSGGIDALIYPQKSLNGKSLAISDLLEHPSFIPAPTTSHGCTRIPTFHLGYRHWCYSHNTIESGCHDAGESIMYLSMGAVGVGHQGKPVFTTSAAVILDDGKNRKSCSVVANPNGCDVLCSLVKQTEDQDYADPTPTPMIHGRLHFNGTYTESMLDQSLFTGHWVAQYPAVGSGSVSHGRLFFPLYGGISKSSSLFPKLRAHAYFTHNEELECKNLTSKQREDLFNAYMPGKIAGSLWAQGIVICNLTTLADCKIAVANTSTMMMAAEGRLQLVQDKVVLYQRSSSWWPVLIYYDILVSELVNARHLDIVNWVPYPQSKFPRPTWTKGLCEKPSICPAVCVTGVYQDVWVVSVGDFSNETVVIGGYLEAASERKDPWIAAANQYNWLTRRQLFTAQTEAAYSSTTCFRNTHQDKVFCLTIMEVTDNLLGDWRIAPLLYEVTVVDRQQSSRKAVAMSEAHRTRFKYYSPENKFTPQH

SEQ ID NO: 75 - protein, 564 aa, Fer-de-Lance paramyxovirus
  MISC_FEATURE: hemagglutinin-neuraminidase protein HN
MDPKSYYCNEDLRSDGGEKSPGGDLYKGIILVSTVISLIIAIISLAFIIDNKINIQSLDPLRGLEDSYLVPIKDKSESISQDIQEGIFPRLNLITAATTTTIPRSIAIQTKDLSDLIMNRCYPSVVNNDTSCDVLAGAIHSNLFSQLDPSTYWTCSSGTPTMNQTVKLLPDNSQIPGSTYSTGCVRIPTFSLGSMIYSYSHNVIYEGCNDHSKSSQYWQLGYISTSKTGEPLQQVSRTLTLNNGLNRKSCSTVAQGRGAYLLCTNVVEDERTDYSTEGIQDLTLDYIDIFGAERSYRYTNNEVDLDRPYAALYPSVGSGTVYNDRILFLGYGGLMTPYGDQAMCQAPECTSATQEGCNSNQLIGYFSGRQIVNCIIEIITVGTEKPIIRVRTIPNSQVWLGAEGRIQTLGGVLYLYIRSSGWHALAQTGIILTLDPIRISWIVNTGYSRPGNGPCSASSRCPAQCITGVYTDIFPLSQNYGYLATVTLLSGVDRVNPVISYGTSTGRVADSQLTSSSQVAAYTTTTCFTFNQKGYCYHIIELSPATLGIFQPVLVVTEIPKICS

SEQ ID NO: 76 - protein, 569 aa, Avian paramyxovirus 4
  MISC_FEATURE: hemagglutinin-neuraminidase
MQGNMEGSRDNLTVDDELKTTWRLAYRVVSLLLMVSALIISIVILTRDNSQSIITAINQSSDADSKWQTGIEGKITSIMTDTLDTRNAALLHIPLQLNTLEANLLSALGGNTGIGPGDLEHCRYPVHDTAYLHGVNRLLINQTADYTAEGPLDHVNFIPAPVTTTGCTRIPSFSVSSSIWCYTHNVIETGCNDHSGSNQYISMGVIKRAGNGLPYFSTVVSKYLTDGLNRKSCSVAAGSGHCYLLCSLVSEPEPDDYVSPDPTPMRLGVLTWDGSYTEQAVPERIFKNIWSANYPGVGSGAIVGNKVLFPFYGGVRNGSTPEVMNRGRYYYIQDPNDYCPDPLQDQILRAEQSYYPTRFGRRMVMQGVLACPVSNNSTIASQCQSYYFNNSLGFIGAESRIYYLNGNIYLYQRSSSWWPHPQIYLLDSRIASPGTQNIDSGVNLKMLNVTVITRPSSGFCNSQSRCPNDCLFGVYSDIWPLSLTSDSIFAFTMYLQGKTTRIDPAWALFSNHAIGHEARLFNKEVSAAYSTTTCFSDTIQNQVYCLSILEVRSELLGAFKIVPFLYRVL

SEQ ID NO: 77 - protein, 571 aa, Human parainfluenza virus 2
  MISC_FEATURE: hemagglutinin-neuraminidase protein
MEDYSNLSLKSIPKRTCRIIFRTATILGICTLIVLCSSILHEIIHLDVSSGLMDSDDSQQGIIQPIIESLKSLIALANQILYNVAIIIPLKIDSIETVIFSALKDMHTGSMSNTNCTPGNLLLHDAAYINGINKFLVLKSYNGTPKYGPLLNIPSFIPSATSPNGCTRIPSFSLIKTHWCYTHNVMLGDCLDFTTSNQYLAMGIIQQSAAAFPIFRTMKTIYLSDGINRKSCSVTAIPGGCVLYCYVATRSEKEDYATTDLAELRLAFYYYNDTFIERVISLPNTTGQWATINPAVGSGIYHLGFILFPVYGGLISGTPSYNKQSSRYFIPKHPNITCAGNSSEQAAAARSSYVIRYHSNRLIQSAVLICPLSDMHTARCNLVMFNNSQVMMGAEGRLYVIDNNLYYYQRSSSWWSASLFYRINTDFSKGIPPIIEAQWVPSYQVPRPGVMPCNATSFCPANCITGVYADVWPLNDPEPTSQNALNPNYRFAGAFLRNESNRTNPTFYTASASALLNTTGFNNTNHKAAYTSSTCFKNTGTQKIYCLIIIEMGSSLLGEFQIIPFLRELIP

SEQ ID NO: 78 - protein, 565 aa, Parainfluenza virus 5
  MISC_FEATURE: hemagglutinin-neuraminidase protein
MVAEDAPVRATCRVLFRTTTLIFLCTLLALSISILYESLITQKQIMSQAGSTGSNSGLGSITDLLNNILSVANQIIYNSAVALPLQLDTLESTLLTAIKSLQTSDKLEQNCSWSAALINDNRYINGINQFYFSIAEGRNLTLGPLLNMPSFIPTATTPEGCTRIPSFSLTKTHWCYTHNVILNGCQDHVSSNQFVSMGIIEPTSAGFPFFRTLKTLYLSDGVNRKSCSISTVPGGCMMYCFVSTQPERDDYFSAAPPEQRIIIMYYNDTIVERIINPPGVLDVWATLNPGTGSGVYYLGWVLFPIYGGVIKGTSLWNNQANKYFIPQMVAALCSQNQATQVQNAKSSYYSSWFGNRMIQSGILACPLRQDLTNECLVLPFSNDQVLMGAEGRLYMYGDSVYYYQRSNSWWPMTMLYKVTITFTNGQPSAISAQNVPTQQVPRPGTGDCSATNRCPGFCLTGVYADAWLLTNPSSTSTFGSEATFTGSYLNTATQRINPTMYIANNTQIISSQQFGSSGQEAAYGHTTCFRDTGSVMVYCIYIIELSSSLLGQFQIVPFIRQVTLS

SEQ ID NO: 79 - protein, 576 aa, Porcine rubulavirus
  MISC_FEATURE: attachment protein
MSQLGTDQIMHLAQPAIARRTWRLCFRIFALFILIAIVITQIFMLTFDHTLLTTTQFLTSIGNLQSTITSWTPDVQAMLSISNQLIYTTSITLPLKISTTEMSILTAIRDHCHCPDCSSACPTRQMLLNDPRYMSGVNQFIGAPTESINITFGPLFGIPSFIPTSTTTQGCTRIPSFALGPSHWCYTHNFITAGCADGGHSNQYLAMGTIQSASDGSPLLITARSYYLSDGVNRKSCSIAVVPGGCAMYCYVATRSETDYYAGNSPPQQLLTLVFSNDTIIERTIHPTGLANGWVMLVPGVGSGTLYNEYLLFPAYGGMQQILANQSGEINQFFTPYNATVRCAMAQPQFSQRAAASYYPRYFSNRWIRSAIVACPYRAIYQTQCTLIPLPNRMVMMGSEGRIFTLGDRLFYYQRSSSWWPYPLLYQVGLNFLTTPPSVSSMTQVPLEHLARPGKGGCPGNSHCPATCVTGVYADVWPLTDPRSGVGGTSLVAAGGLDSTSERMAPVNYLAIGESLLSKTYLLSKTQPAAYTTTTCFRDTDTGKIYCITIAELGKVLLGEFQIVPFLREIKIQSRY

SEQ ID NO: 80 - protein, 580 aa, Avian paramyxovirus 2
  MISC_FEATURE: hemagglutinin-neuraminidase
MDFPSRENLAAGDISGRKTWRLLFRILTLSIGVVCLAINIATIAKLDHLDNMASNTWTTTEADRVISSITTPLKVPVNQINDMFRIVALDLPLQMTSLQKEITSQVGFLAESINNVLSKNGSAGLVLVNDPEYAGGIAVSLYQGDASAGLNFQPISLIEHPSFVPGPTTAKGCIRIPTFHMGPSHWCYSHNIIASGCQDASHSSMYISLGVLKASQTGSPIFLTTASHLVDDNINRKSCSIVASKYGCDILCSIVIETENEDYRSDPATSMIIGRLFFNGSYTESKINTGSIFSLFSANYPAVGSGIVVGDEAAFPIYGGVKQNTWLFNQLKDFGYFTHNDVYKCNRTDIQQTILDAYRPPKISGRLWVQGILLCPVSLRPDPGCRLKVFNTSNVMMGAEARLIQVGSTVYLYQRSSSWWVVGLTYKLDVSEITSQTGNTLNHVDPIAHTKFPRPSFRRDACARPNICPAVCVSGVYQDIWPISTATNNSNIVWVGQYLEAFYSRKDPRIGIATQYEWKVTNQLFNSNTEGGYSTTTCFRNTKRDKAYCVVISEYADGVFGSYRIVPQLIEIRTTTGKSE

SEQ ID NO: 81 - protein, 236 aa, Human metapneumovirus
  MISC_FEATURE: attachment glycoprotein G
MEVKVENIRTIDMLKARVKNRVARSKCFKNASLILIGITTLSIALNIYLIINYTMQENTSESEHHTSSSPMESSRETPTVPIDNSDTNPSSQYPTQQSTEGSTLYFAASASSPETEPTSTPDTTSRPPFVDTHTTPPSASRTKTSPAVHTKNNPRISSRTHSPPWAMTRTVRRTTTLRTSSIRKRSSTASVQPDSSATTHKHEEASPVSPQTSASTTRPQRKSMEASTSTTYNQTS

SEQ ID NO: 82 - protein, 414 aa, Canine pneumovirus
  MISC_FEATURE: attachment protein
MRPAEQLIQENYKLTSLSMGRNFEVSGSTTNLNFERTQYPDTFRAVVKVNQMCKLIAGVLTSAAVAVCVGVIMYSVFTSNHKANSMQNATIRNSTSAPPQPTAGPPTTEQGTTPKFTKPPTKTTTHHEITEPAKMVTPSEDPYQCSSNGYLDRPDLPEDFKLVLDVICKPPGPEHHSTNCYEKREINLGSVCPDLVTMKANMGLNNGGGEEAAPYIEVITLSTYSNKRAMCVHNGCDQGFCFFLSGLSTDQKRAVLELGGQQAIMELHYDSYWKHYWSNSNCVVPRTNCNLTDQTVILFPSFNNKNQSQCTTCADSAGLDNKFYLTCDGLSRNLPLVGLPSLSPQAHKAALKQSTGTTTAPTPETRNPTPAPRRSKPLSRKKRALCGVDSSREPKPTMPYWCPMLQLFPRRSNS

SEQ ID NO: 83 - protein, 228 aa, Respiratory syncytial virus type A
  MISC_FEATURE: truncated attachment glycoprotein
MSKTKDQRAAKTLEKTWDTLNHLLFISSCLYKSNLKSIAQITLSILAMTIPTSLIIVATTFIASANNKVTPTTAIIQDATSQIKNTTPTHLTQNPQPGISFFNLSGTISQTTAILAPTTPSVEPILQSTTVKTKNTTTTQIQPSKLTTKQRQNKPPNKPNDDFHFEVFNFVPCSICSNNPTCWAICKRIPSKKPGKKTTTKPTKKQTIKTTKKDLKPQTTKPKEAPTT

SEQ ID NO: 84 - protein, 577 aa, Avian paramyxovirus 8
  MISC_FEATURE: hemagglutinin-neuraminidase protein
MSNIASSLENIVEQDSRKTTWRAIFRWSVLLITTGCLALSIVSIVQIGNLKIPSVGDLADEVVTPLKTTLSDTLRNPINQINDIFRIVALDIPLQVTSIQKDLASQFSMLIDSLNAIKLGNGTNLIIPTSDKEYAGGIGNPVFTVDAGGSIGFKQFSLIEHPSFIAGPTTTRGCTRIPTFHMSESHWCYSHNIIAAGCQDASASSMYISMGVLHVSSSGTPIFLTTASELIDDGVNRKSCSIVATQFGCDILCSIVIEKEGDDYWSDTPTPMRHGRFSFNGSFVETELPVSSMFSSFSANYPAVGSGEIVKDRILFPIYGGIKQTSPEFTELVKYGLFVSTPTTVCQSSWTYDQVKAAYRPDYISGRFWAQVILSCALDAVDLSSCIVKIMNSSTVMMAAEGRIIKIGIDYFYYQRSSSWWPLAFVTKLDPQELADTNSIWLTNSIPIPQSKFPRPSYSENYCTKPAVCPATCVTGVYSDIWPLTSSSSLPSIIWIGQYLDAPVGRTYPRFGIANQSHWYLQEDILPTSTASAYSTTTCFKNTARNRVFCVTIAEFADGLFGEYRITPQLYELVRNN

SEQ ID NO: 85 - protein, 576 aa, Porcine parainfluenza virus 1
  MISC_FEATURE: haemagglutinin protein
MEETKVKTSEYWARSPQIHATNHPNVQNREKIKEILTILISFISSLSLVLVIAVLIMQSLHNGTILRCKDVGLESINKSTYSISNAILDVIKQELITRIINTQSSVQVALPILINKKIQDLSLIIEKSSKVHQNSPTCSGVAALTHVEGIKPLDPDDYWRCPSGEPYLEDELTLSLIPGPSMLAGTSTIDGCVRLPSLAIGKSLYAYSSNLITKGCQDIGKSYQVLQLGIITLNSDLHPDLNPIISHTYDINDNRKSCSVAVSETKGYQLCSMPRVNEKTDYTSDGIEDIVFDVLDLKGSSRSFKFSNNDINFDHPFSALYPSVGSGIIWKNELYFLGYGALTTALQGNTKCNLMGCPGATQDNCNKFISSSWLYSKQMVNVLIQVKGYLSSKPSIIVRTIPITENYVGAEGKLVGTRERIYIYTRSTGWHTNLQIGVLNINHPITITWTDHRVLSRPGRSPCAWNNKCPRNCTTGVYTDAYPISPDANYVATVTLLSNSTRNNPTIMYSSSDRVYNMLRLRNTELEAAYTTTSCIVHFDRGYCFHIIEINQKELNTLQPMLFKTAIPKACRISNL

SEQ ID NO: 86 - protein, 579 aa, Human parainfluenza virus 4b
  MISC_FEATURE: hemagglutinin-neuraminidase protein
MQDSRGNTQIFSQANSMVKRTWRLLFRIVTLILLISIFVLSLIIVLQSTPGNLQSDVDIIRKELDELMENFETTSKSLLSVANQITYDVSVLTPIRQEATETNIIAKIKDHCKDRVVKGESTCTLGHKPLHDVSFLNGFNKFYFTYRDNVQIRLNPLLDYPNFIPTATTPHGCIRIPSFSLSQTHWCYTHNTILRGCEDTASSKQYVSLGTLQTLENGDPYFKVEYSHYLNDRKNRKSCSVVAVLDGCLLYCVIMTKNETENFKDPQLATQLLTYISYNGTIKERIINPPGSSRDWVHISPGVGSGILYSNYIIFPLYGGLMENSMIYNNQSGKYFFPNSTKLPCSNKTSEKITGAKDSYTITYFSKRLIQSAFLICDLRQFLSEDCEILIPSNDHMLVGAEGRLYNIENNIFYYQRGSSWWPYPSLYRIKLNSNKKYPRIIEIKFTKIEIAPRPGNKDCPGNKACPKECITGVYQDIWPLSYPNTAFPHKKRAYYTGFYLNNSLARRNPTFYTADNLDYHQQERLGKFNLTAGYSTTTCFKQTTTARLYCLYILEVGDSVIGDFQIFPFLRSIDQAIT

SEQ ID NO: 87 - protein, 582 aa, Avian paramyxovirus 2
  MISC_FEATURE: hemagglutinin-neuraminidase
MDALSRENLTEISQGGRRTWRMLFRILTLVLTLVCLAINIATIAKLDSIDTSKVQTWTTTESDRVIGSLTDTLKIPINQVNDMFRIVALDLPLQMTTLQKEIASQVGFLAESINNFLSKNGSAGSVLVNDPEYAGGIGTSLFHGDSASGLDFEAPSLIEHPSFIPGPTTAKGCIRIPTFHMSASHWCYSHNIIASGCQDAGHSSMYISMGVLKATQAGSPSFLTTASQLVDDKLNRKSCSIISTTYGCDILCSLVVENEDADYRSDPPTDMILGRLFFNGTYSESKLNTSAIFQLFSANYPAVGSGIVLGDEIAFPVYGGVKQNTWLFNQLKDYGYFAHNNVYKCNNSNIHQTVLNAYRPPKISGRLWSQVVLICPMRLFINTDCRIKVFNTSTVMMGAEARLIQVGSDIYLYQRSSSWWVVGLTYKLDFQELSSKTGNILNNVSPIAHAKFPRPSYSRDACARPNICPAVCVSGVYQDIWPISTAHNLSQVVWVGQYLEAFYARKDPWIGIATQYDWKKNVRLFNANTEGGYSTTTCFRNTKRDKAFCVIISEYADGVFGSYRIVPQLIEIRTTSKKGLPS

SEQ ID NO: 88 - protein, 610 aa, Avian paramyxovirus goose/Shimane/67/2000
  MISC_FEATURE: hemagglutinin-neuraminidase
MQPGISEVSFVNDERSERGTWRLLFRILTIVLCLTSIGIGIPALIYSKEAATSGDIDKSLEAVKTGMSTLSSKIDESINTEQKIYRQVILEAPVSQLNMESNILSAITSLSYQIDGTSNSSGCGSPMHDQDFVGGINKEIWTTDNVNLGEITLTPFLEHLNFIPAPTTGNGCTRIPSFDLGLTHWCYTHNVILSGCQDYSSSFQYIALGVLKISATGHVFLSTMRSINLDDERNRKSCSISATSIGCDIICSLVTEREVDDYNSPAATPMIHGRLDFSGKYNEVDLNVGQLFGDWSANYPGVGGGSFLNGRVWFPIYGGVKEGTPTFKENDGRYAIYTRYNDTCPDSESEQVSRAKSSYRPSYFGGKLVQQAVLSIKIDDTLGLDPVLTISNNSITLMGAESRVLQIEEKLYFYQRGTSWFPSLIMYPLTVDDKMVRFEPPTIFDQFTRPGNHPCSADSRCPNACVTGVYTDGYPIVFHNNHSIAAVYGMQLNDVTNRLNPRSAVWYGVSMSNVIRVSSSTTKAAYTTSTCFKVKKTQRVYCLSIGEIGNTLFGEFRIVPLLLEVYSEKGKSLKSSFDGWEDISINNPLRPLDNHRVDPILISNYTSSWP

SEQ ID NO: 89 - protein, 257 aa, Bovine respiratory syncytial virus
  MISC_FEATURE: attachment glycoprotein
MSNHTHHLKFKTLKRAWKASKYFIVGLSCLYKFNLKSLVQTALTTLAMITLTSLVITAIIYISVGNAKAKPTSKPTIQQTQQPQNHTSPFFTEHNYKSTHTSIQSTTLSQLPNTDTTRETTYSHSINETQNRKIKSQSTLPATRKPPINPSGSNPPENHQDHNNSQTLPYVPCSTCEGNLACLSLCQIGPERAPSRAPTITLKKTPKPKTTKKPTKTTIHHRTSPEAKLQPKNNTAAPQQGILSSPEHHTNQSTTQI

SEQ ID NO: 90 - protein, 595 aa, Menangle virus
  MISC_FEATURE: attachment protein
MWNSIPQLVSDHEEAKGKFTDIPLQDDTDSQHPSGSKSTCRTLFRTVSIILSLVILVLGVTSTMFSAKYSGGCATNSQLLGVSNLINQIQKSIDSLISEVNQVSITTAVTLPIKIMDFGKSVTDQVTQMIRQCNTVCKGPGQKPGSQNVRIMPSNNLSTFQNINMSARGIAYQDVPLTFVRPIKNPQSCSRFPSYSVSFGVHCFANAVTDQTCELNQNTFYRVVLSVSKGNISDPSSLETKAETRTPKGTPVRTCSIISSVYGCYLLCSKATVPESEEMKTIGFSQMFILYLSMDSKRIIYDNIVSSTSAIWSGLYPGEGAGIWHMGQLFFPLWGGIPFLTPLGQKILNSTLDIPEVGSKCKSDLTSNPAKTKDMLFSPYYGENVMVFGFLTCYLLSNVPTNCHADYLNSTVLGFGSKAQFYDYRGIVYMYIQSAGWYPFTQIFRITLQLKQNRLQAKSIKRIEVTSTTRPGNRECSVLRNCPYICATGLFQVPWIVNSDAITSKEVDNMVFVQAWAADFTEFRKGILSLCSQVSCPINDLLSKDNSYMRDTTTYCFPQTVPNILSCTSFVEWGGDSGNPINILEIHYEVIFVAS

SEQ ID NO: 91 - protein, 574 aa, Avian paramyxovirus 5
  MISC_FEATURE: hemagglutinin neuraminidase protein
MDKSYYTEPEDQRGNSRTWRLLFRLIVLTLLCLIACTSVSQLFYPWLPQVLSTLISLNSSIITSSNGLKKEILNQNIKEDLIYREVAINIPLTLDRVTVEVGTAVNQITDALRQLQSVNGSAAFALSNSPDYSGGIEHLVFQRNTLINRSVSVSDLIEHPSFIPTPTTQHGCTRIPTFHLGTRHWCYSHNIIGQGCADSGASMMYISMGALGVSSLGTPTFTTSATSILSDSLNRKSCSIVATTEGCDVLCSIVTQTEDQDYADHTPTPMIHGRLWFNGTYTERSLSQSLFLGTWAAQYPAVGSGIMTPGRVIFPFYGGVIPNSPLFLDLERFALFTHNGDLECRNLTQYQKEAIYSAYKPPKIRGSLWAQGFIVCSVGDMGNCSLKVINTSTVMMGAEGRLQLVGDSVMYYQRSSSWWPVGILYRLSLVDIIARDIQVVINSEPLPLSKFPRPTWTPGVCQKPNVCPAVCVTGVYQDLWAISAGETLSEMTFFGGYLEASTQRKDPWIGVANQYSWFMRRRLFKTSTEAAYSSSTCFRNTRLDRNFCLLIFELTDNLLGDWRIVPLLFELTIV

SEQ ID NO: 92 - protein, 622 aa, Cedar virus
  MISC_FEATURE: attachment glycoprotein
MLSQLQKNYLDNSNQQGDKMNNPDKKLSVNFNPLELDKGQKDLNKSYYVKNKNYNVSNLLNESLHDIKFCIYCIFSLLIIITIINIITISIVITRLKVHEENNGMESPNLQSIQDSLSSLTNMINTEITPRIGILVTATSVTLSSSINYVGTKTNQLVNELKDYITKSCGFKVPELKLHECNISCADPKISKSAMYSTNAYAELAGPPKIFCKSVSKDPDFRLKQIDYVIPVQQDRSICMNNPLLDISDGFFTYIHYEGINSCKKSDSFKVLLSHGEIVDRGDYRPSLYLLSSHYHPYSMQVINCVPVTCNQSSFVFCHISNNTKTLDNSDYSSDEYYITYFNGIDRPKTKKIPINNMTADNRYIHFTFSGGGGVCLGEEFIIPVTTVINTDVFTHDYCESFNCSVQTGKSLKEICSESLRSPTNSSRYNLNGIMIISQNNMTDFKIQLNGITYNKLSFGSPGRLSKTLGQVLYYQSSMSWDTYLKAGFVEKWKPFTPNWMNNTVISRPNQGNCPRYHKCPEICYGGTYNDIAPLDLGKDMYVSVILDSDQLAENPEITVFNSTTILYKERVSKDELNTRSTTTSCFLFLDEPWCISVLETNRFNGKSIRPEIYSYKIPKYC

SEQ ID NO: 93 - protein, 595 aa, Teviot virus
  MISC_FEATURE: attachment protein
MWSTQASKHPAMVNSATNLVDIPLDHPSSAQFPINRKRTGRLIYRLFSILCNLILISILISLVVIWSRSSRDCAKSDGLSSVDNQLSSLSRSINSLITEVNQISVTTAINLPIKLSEFGKSVVDQVTQMIRQCNAACKGPGEKPGIQNVRINIPNNFSTYSELNRTANSLNFQSRTALFARPNPYPKTCSRFPSYSVYFGIHCFSHAVTDSSCELSDSTYYRLVIGVADKNLSDPADVKYIGETTTPVRVQTRGCSVVSSIYGCYLLCSKSNQDYQDDFREQGFHQMFILFLSRELKTTFFDDMVSSTTVTWNGLYPGEGSGIWHMGHLVFPLWGGIRFGTHASEGILNSTLELPPVGPSCKRSLADNGLINKDVLFSPYFGDSVMVFAYLSCYMLSNVPTHCQVETMNSSVLGFGSRAQFYDLKGIVYLYIQSAGWFSYTQLFRLSLQSKGYKLSVKQIKRIPISSTSRPGTEPCDIIHNCPYTCATGLFQAPWIVNGDSIRDRDVRNMAFVQAWSGAINTFQRPFMSICSQYSCPLSELLDSESSIMRSTTTYCFPSLTESILQCVSFIEWGGPVGNPISINEVYSSISFRPD

SEQ ID NO: 94 - protein, 632 aa, Mossman virus
  MISC_FEATURE: attachment glycoprotein
MVDPPAVSYYTGTGRNDRVKVVTTQSTNPYWAHNPNQGLRRLIDMVVNVIMVTGVIFALINIILGIVIISQSAGSRQDTSKSLDIIQHVDSSVAITKQIVMENLEPKIRSILDSVSFQIPKLLSSLLGPGKTDPPIALPTKASTPVIPTEYPSLNTTTCLRIEESVTQNAAALFNISFDLKTVMYELVTRTGGCVTLPSYSELYTRVRTFSTAIRNPKTCQRAGQETDLNLIPAFIGTDTGILINSCVRQPVIATGDGIYALTYLTMRGTCQDHRHAVRHFEIGLVRRDAWWDPVLTPIHHFTEPGTPVFDGCSLTVQNQTALALCTLTTDGPETDIHNGASLGLALVHFNIRGEFSKHKVDPRNIDTQNQGLHLVTTAGKSAVKKGILYSFGYMVTRSPEPGDSKCVTEECNQNNQEKCNAYSKTTLDPDKPRSMIIFQIDVGAEYFTVDKVVVVPRTQYYQLTSGDLFYTGEENDLLYQLHNKGWYNKPIRGRVTFDGQVTLHEHSRTYDSLSNQRACNPRLGCPSTCELTSMASYFPLDKDFKAAVGVIALRNGMTPIITYSTDDWRNHWKYIKNADLEFSESSLSCYSPNPPLDDYVLCTAVITAKVMSNTNPQLLATSWYQYDKCHT

SEQ ID NO: 95 - protein, 709 aa, J-virus
  MISC_FEATURE: attachment glycoprotein
MNPVAMSNFYGINQADHLREKGDQPEKGPSVLTYVSLITGLLSLFTIIALNVTNIIYLTGSGGTMATIKDNQQSMSGSMRDISGMLVEDLKPKTDLINSMVSYTIPSQISAMSAMIKNEVLRQCTPSFMFNNTICPIAEHPVHTSYFEEVGIEAISMCTGTNRKLVVNQGINFVEYPSFIPGSTKPGGCVRLPSFSLGLEVFAYAHAITQDDCTSSSTPDYYFSVGRIADHGTDVPVFETLAEWFLDDKMNRRSCSVTAAGKGGWLGCSILVGSFTDELTSPEVNRISLSYMDTFGKKKDWLYTGSEVRADQSWSALFFSVGSGVVIGDTVYFLVWGGLNHPINVDAMCRAPGCQSPTQSLCNYAIKPQEWGGNQIVNGILHFKHDTNEKPTLHVRTLSPDNNWMGAEGRLFHFHNSGKTFIYTRSSTWHTLPQVGILTLGWPLSVQWVDITSISRPGQSPCEYDNRCPHQCVTGVYTDLFPLGVSYEYSVTAYLDQVQSRMNPKIALVGAQEKIYEKTITTNTQHADYTTTSCFAYKLRVWCVSIVEMSPGVITTRQPVPFLYHLNLGCQDTSTGSLTPLDAHGGTYLNTDPVGNKVDCYFVLHEGQIYFGMSVGPINYTYSIVGRSREIGANMNVSLNQLCHSVYTEFLKEKEHPGTRNNIDVEGWLLKRIETLNGTKIFGLDDLEGSGPGHQSGPEDPSIAPIGHN

SEQ ID NO: 96 - protein, 264 aa, Avian metapneumovirus
  MISC_FEATURE: attachment glycoprotein
MEVKVENVGKSQELKVKVKNFIKRSDCKKKLFALILGLVSFELTMNIMLSVMYVESNEALSLCRIQGTPAPRDNKTNTENATKETTLHTTTTTRDPEVRETKTTKPQANEGATNPSRNLTTKGDKHQTTRATTEAELEKQSKQTTEPGTSTQKHTPARPSSKSPTTTQATAQPTTPTAPKASTAPKNRQATTKKTETDTTTASRARNTNNPTETATTTPKATTETGKGKEGPTQHTTKEQPETTARETTTPQPRRTAGASPRAS

SEQ ID NO: 97 - protein, 391 aa, Avian metapneumovirus
  MISC_FEATURE: attachment protein
MGSKLYMVQGTSAYQTAVGFWLDIGRRYILAIVLSAFGLTCTVTIALTVSVIVEQSVLEECRNYNGGDRDWWSTTQEQPTTAPSATPAGNYGGLQTARTRKSESCLHVQISYGDMYSRSDTVLGGFDCMGLLVLCKSGPICQRDNQVDPTALCHCRVDLSSVDCCKVNKISTNSSTTSEPQKTNPAWPSQDNTDSDPNPQGITTSTATLLSTSLGLMLTSKTGTHKSGPPQALPGSNTNGKTTTDRELGSTNQPNSTTNGQHNKHTQRMTLPPSYDNTRTILQHTTPWEKTFSTYKPTHSPTNESDQSLPTTQNSINCEHFDPQGKEKICYRVGSYNSNITKQCRIDVPLCSTYNTVCMKTYYTEPFNCWRRIWRCLCDDGVGLVEWCCTS

SEQ ID NO: 98 - protein, 1052 aa, Tailam virus
  MISC_FEATURE: attachment glycoprotein
MSQLAAHNLAMSNFYGIHQGGQSTSQKEEEQPVQGVIRYASMIVGLLSLFTIIALNVTNIIYMTESGGTMQSIKNAQGSIDGSMKDLSGTIMEDIKPKTDLINSMVSYNIPAQLSMIHQIIKNDVLKQCTPSFMFNNTICPLAENPTHSRYFEEVNLDSISECSGNEMSLELGTEPEFIEYPSFAPGSTKPGSCVRLPSFSLSSTVFAYTHTIMGHGCSELDVGDHYLAIGRIADAGHEIPQFETISSWFINDKINRRSCTVAAGVMETWMGCVIMTETFYDDLDSLDTGKITISYLDVFGRKKEWIYTRSEILYDYTYTSVYFSIGSGVVVGDTVYFLLWGSLSSPIEETAYCYAPGCSNYNQRMCNEAQRPAKFGHRQMANAILRFKTNSMGKPSISVRTLSPTVIPFGTEGRLIYSDFTKIIYLYLRSTSWYVLPLTGLLILGPPVSISWVTQEAVSRPGEYPCGASNRCPKDCITGVYTDLFPLGARYEYAVTVYLNAETYRVNPTLALIDRSKIIARKKITTESQKAGYTTTTCFVFKLRIWCMSVVELAPATMTAFEPVPFLYQLDLTCKRNNGTTAMQFSGQDGMYKSGRYKSPRNECFFEKVSNKYYFVVSTPEGIQPYEVRDLTPERVSHVIMYISDVCAPALSAFKKLIPAMRPITTLTIGNWQFRPVDISGGLRVNIYRNLTRYGDLSMSAPEDPGTDTFPGTHAPSKGHEEVGHYTLPNEKLSEVTTAAVKTKESLNLIPDTKDTRGEEENGSGLNEIITGHTTPGHIKTHPAETKVTKHTVIIPQIEEDGSGATTSTELQDETGYHTEDYNTTNTNGSLTAPNERNNYTSGDHTVSGEDITHTITVSDRTKTTQTLPTDNTFNQTPTKIQEGSPKSESTPKDYTAIESEDSHFTDPTLIRSTPEGTIVQVIGDQFHSAVTQLGESNAIGNSEPIDQGNNLIPTTDRGTMDNTSSQSHSSTTSTQGSHSAGHGSQSNMNLTALADTDSVTDQSTSTQEIDHEHENVSSILNPLSRHTRVMRDTVQEALTGAWGFIRGMIP

SEQ ID NO: 99 - protein, 242 aa, Human metapneumoviru
  MISC_FEATURE: attachment glycoprotein G
MEVRVENIRAIDMFKAKIKNRIRNSRCYRNATLILIGLTALSMALNIFLIIDHATLRNMIKTENCANMPSAEPSKKTPMTSIAGPSTKPNPQQATQWTTENSTSPAATLEGHPYTGTTQTPDTTAPQQTTDKHTALPKSTNEQITQTTTEKKTTRATTQKRKKEKKTQTKPQVQLQPKQPTPPTKSEMQVRQSQHPTDPELTPLPKAVNRQPGQQNQAPHHIMHGEVQDPGERNTQVSHPSS

SEQ ID NO: 100 - protein, 585 aa, Avian metapneumovirus type C
  MISC_FEATURE: attachment glycoprotein
MEVKIENVGKSQELRVKVKNFIKRSDCKKKLFALILGLISFDITMNIMLSVMYVESNEALSSCRVQGTPAPRDNRTNTENTAKETTLHTMTTTRNTEAGGTKTTKPQADERATSPSKNPTIGADKHKTTRATTEAEQEKQSKQTTEPGTSTPKHIPARPSSKSPATTKTTTQPTTPTVAKGGTAPKNRQTTTKKTEADTPTTSRAKQTNKPTGTETTPPRATTETDKDKEGPTQHTTKEQPETTAGGTTTPQPRRTTSRPAPTTNTKEGAETTGTRTTKSTQTSASPPRPTRSTPSKTATGTNKRATTTKGPNTASTDRRQQTRTTPKQDQQTQTKAKTTTNKAHAKAATTPEHNTDTTDSMKENSKEDKTTRDPSSKATTKQENTSKGTTATNLGNNTEAGARTPPTTTPTRHTTEPATSTAGGHTKARTTRWKSTAARQPTRNNTTADTKTAQSKQTTPAQLGNNTTPENTTPPDNKSNSQTNVAPTEEIEIGSSLWRRRYVYGPCRENALEHPMNPCLKDNTTWIYLDNGRNLPAGYYDSKTDKIICYGIYRGNSYCYGRIECTCKNGTGLLSYCCNSYNWS

SEQ ID NO: 101 - protein, 609 aa, Rinderpest morbillivirus
  MISC_FEATURE: H protein
MSSPRDRVNAFYKDNLQFKNTRVVLNKEQLLIERPYMLLAVLFVMFLSLVGLLAIAGIRLHRAAVNTAEINSGLTTSIDITKSIEYQVKDVLTPLFKIIGDEVGLRTPQRFTDLTKFISDKIKFLNPDKEYDFRDINWCISPPERIKINYDQYCAHTAAEELITMLVNSSLAGTAVLRTSLVNLGRSCTGSTTTKGQFSNMSLALSGIYSGRGYNISSMITITEKGMYGSTYLVGKHNQGARRPSTAWQRDYRVFEVGIIRELGVGTPVFHMTNYLELPRQPELEICMLALGEFKLAALCLADNSVALHYGGLRDDHKIRFVKLGVWPSPADSDTLATLSAVDPTLDGLYITTHRGIIAAGKAVWAVPVTRTDDQRKMGQCRREACREKPPPFCNSTDWEPLEAGRIPAYGILTIRLGLADKPEIDIISEFGPLITHDSGMDLYTPLDGNEYWLTIPPLQNSALGTVNTLVLEPSLKISPNILTLPIRSGGGDCYTPTYLSDLADDDVKLSSNLVILPSRNLQYVSATYDTSRVEHAIVYYIYSTGRLSSYYYPVKLPIKGDPVSLQIGCFPWGLKLWCHHFCSVIDSGTGKQVTHTGAVGIEITCNSR

SEQ ID NO: 102 - protein, 575 aa, Avian paramyxovirus 10
  MISC_FEATURE: hemagglutinin-neuraminidase
MDSSQMNILDAMDRESSKRTWRGVFRVTTIIMVVTCVVLSAITLSKVAHPQGFDTNELGNGIVDRVSDKITEALTVPNNQIGEIFKIVALDLHVLVSSSQQAIAGQIGMLAESINSILSQNGSASTILSSSPEYAGGIGVPLFSNKLTNGTVIKPITLIEHPSFIPGPTTIGGCTRIPTFHMASSHWCYSHNIIEKGCKDSGISSMYISLGVLQVLKKGTPVFLVTASAVLSDDRNRKSCSIISSRFGCEILCSLVTEAESDDYKSDTPTGMVHGRLYFNGTYREGLVDTETIFRDFSANYPGVGSGEIVEGHIHFPIYGGVKQNTGLYNSLTPYWLDAKNKYDYCKLPYTNQTIQNSYKPPFIHGRFWAQGILSCELDLFNLGNCNLKIIRSDKVMMGAESRLMLVGSKLLMYQRASSWWPLGITQEIDIAELHSSNTTILREVKPILSSKFPRPSYQPNYCTKPSVCPAVCVTGVYTDMWPISITGNISDYAWISHYLDAPTSRQQPRIGIANQYFWIHQTTIFPTNTQSSYSTTTCFRNQVRSRMFCLSIAEFADGVFGEFRIVPLLYELRV

SEQ ID NO: 103 - protein, 593 aa, Tioman virus
  MISC_FEATURE: attachment protein
MWATSESKAPIPANSTLNLVDVPLDEPQTITKHRKQKRTGRLVFRLLSLVLSLMTVILVLVILASWSQKINACATKEGFNSLDLQISGLVKSINSLITEVNQISITTAINLPIKLSDFGKSIVDQVTQMIRQCNAVCKGPGEKPGIQNIRINIPNNFSTYLELNNTVKSIELQRRPALLARPNPIPKSCSRFPSYSVNFGIHCFAHAITDQSCELSDKTYYRLAIGISDKNLSDPSDVKYIGEAFTPMGLQARGCSVISSIYGCYLLCSKSNQGYEADFQTQGFHQMYILFLSRDLKTTLFNDMISSTTVVWNGLYPGEGAGIWHMGYLIFPLWGGIKIGTPASTSILNSTLDLPLVGPSCKSTLEENNLINKDVLFSPYFGESVMVFGFLSCYMLSNVPTHCQVEVLNSSVLGFGSRSQLMDLKGIVYLYIQSAGWYSYTQLFRLSLQSRGYKLTVKQIRRIPISSTTRPGTAPCDVVHNCPYTCATGLFQAPWIVNGDSILDRDVRNLVFVQAWSGNFNTFQKGLISICNQYTCPLTTLLDNDNSIMRSTTTYCYPSLSEYNLQCQSFIEWGGPVGNPIGILEVHYIIKFK

SEQ ID NO: 104 - protein, 604 aa, Dolphin morbillivirus
  MISC_FEATURE: haemagglutinin protein
MSSPRDKVDAFYKDIPRPRNNRVLLDNERVIIERPLILVGVLAVMFLSLVGLLAIAGVRLQKATTNSIEVNRKLSTNLETTVSIEHHVKDVLTPLFKIIGDEVGLRMPQKLTEIMQFISNKIKFLNPDREYDFNDLHWCVNPPDQVKIDYAQYCNHIAAEELIVTKFKELMNHSLDMSKGRIFPPKNCSGSVITRGQTIKPGLTLVNIYTTRNFEVSFMVTVISGGMYGKTYFLKPPEPDDPFEFQAFRIFEVGLVRDVGSREPVLQMTNFMVIDEDEGLNFCLLSVGELRLAAVCVRGRPVVTKDIGGYKDEPFKVVTLGIIGGGLSNQKTEIYPTIDSSIEKLYITSHRGIIRNSKARWSVPAIRSDDKDKMEKCTQALCKSRPPPSCNSSDWEPLTSNRIPAYAYIALEIKEDSGLELDITSNYGPLIIHGAGMDIYEGPSSNQDWLAIPPLSQSVLGVINKVDFTAGFDIKPHTLTTAVDYESGKCYVPVELSGAKDQDLKLESNLVVLPTKDFGYVTATYDTSRSEHAIVYYVYDTARSSSYFFPFRIKARGEPIYLRIECFPWSRQLWCHHYCMINSTVSNEIVVVDNLVSINMSCSR

SEQ ID NO: 105 - protein, 734 aa, Beilong virus
  MISC_FEATURE: attachment glycoprotein
MSQLAAHNLAMSNFYGTHQGDLSGSQKGEEQQVQGVIRYVSMIVSLLSLFTIIALNVTNIIYMTESGGTMQSIKTAQGSIDGSMREISGVIMEDVKPKTDLINSMVSYNIPAQLSMIHQIIKNDVPKQCTPSFMFNNTICPLAENPTHSRYFEEVNLDSISECSGPDMHLGLGVNPEFIEFPSFAPGSTKPGSCVRLPSFSLSTTVFAYTHTIMGHGCSELDVGDHYFSVGRIADAGHEIPQFETISSWFINDKINRRSCTVAAGAMEAWMGCVIMTETFYDDRNSLDTGKLTISYLDVFGRKKEWIYTRSEILYDYTYTSVYFSVGSGVVVGDTVYFLIWGSLSSPIEETAYCFAPDCSNYNQRMCNEAQRPSKFGHRQMVNGILKFKTTSTGKPLLSVGTLSPSVVPFGSEGRLMYSEITKIIYLYLRSTSWHALPLTGLFVLGPPTSISWIVQRAVSRPGEFPCGASNRCPKDCVTGVYTDLFPLGSRYEYAATVYLNSETYRVNPTLALINQTNIIASKKVTTESQRAGYTTTTCFVFKLRVWCISVVELAPSTMTAYEPIPFLYQLDLTCKGKNGSLAMRFAGKEGTYKSGRYKSPRNECFFEKVSNKYYFIVSTPEGIQPYEIRDLTPDRMPHIIMYISDVCAPALSAFKKLLPAMRPITTLTIGNWQFRPVEVSGGLRVNIGRNLTKEGDLTMSAPEDPGSNTFPGNHIPGNGILDAGYYTVEYPKE

SEQ ID NO: 106 - protein, 582 aa, Mapuera virus
  MISC_FEATURE: attachment protein
MASLQSEPGSQKPHYQSDDQLVKRTWRSFFRFSVLVVTITSLALSIITLIGVNRISTAKQISNAFAAIQANILSSIPDIRPINSLLNQLVYTSSVTLPLRISSLESNVLAAIQEACTYRDSQSSCSATMSVMNDQRYIEGIQVYSGSFLDLQKHTLSPPIAFPSFIPTSTTTVGCTRIPSFSLTKTHWCYTHNYIKTGCRDATQSNQYIALGTIYTDPDGTPGFSTSRSQYLNDGVNRKSCSISAVPMGCALYCFISVKEEVDYYKGTVPPAQTLILFFFNGTVHEHRIVPSSMNSEWVMLSPGVGSGVFYNNYIIFPLYGGMTKDKAEKRGELTRFFTPKNSRSLCKMNDSVFSNAAQSAYYPPYFSSRWIRSGLLACNWNQIITTNCEILTFSNQVMMMGAEGRLILINDDLFYYQRSTSWWPRPLVYKLDIELNYPDSHIQRVDQVEVTFPTRPGWGGCVGNNFCPMICVSGVYQDVWPVTNPVNTTDSRTLWVGGTLLSNTTRENPASVVTSGGSISQTVSWFNQTVPGAYSTTTCFNDQVQGRIFCLIIFEVGGGLLGEYQIVPFLKELKYQGAVHA

SEQ ID NO: 107 - protein, 657 aa, Nariva virus
  MISC_FEATURE: attachment protein
MAPINYPASYYTNNAERPVVITTKSTESKGQRPLPLGNARFWEYFGHVCGTLTFCMSLIGIIVGIIALANYSSDKDWKGRIGGDIQVTRMATEKTVKLILEDTTPKLRNILDSVLFQLPKMLASIASKINTQTPPPPTTSGHSTALATQCSSNCENRPEIGYDYLRQVEQSLQRITNISIQLLEASEIHSMAGAYPNALYKIRTQDSWSVTAKECPLQAFQPNLNLIPAMIGTATGALIRNCVRQPVIVVDDGVYMLTYLAMRGSCQDHQKSVRHFEMGVITSDPFGDPVPTPLRHWTKRALPAYDGCALAVKGHAGFALCTETSVGPLRDRTAKRKPNIVLFKASLVGELSERVIPPQSWLSGFSFFSVYTVAGKGYAYHSKFHAFGNVVRVGQSEYQAKCRGTGCPTANQDDCNTAQRVSQEDNTYLHQAILSVDIDSVIDPEDVVYVIERDQYYQASAGDLYRVPETGEILYNLHNGGWSNEVQVGRIQPSDRFYMREIQLTSTRVPAPNGCNRVKGCPGGCVAVISPAFTPMHPEFNVGVGIFPMNQPHNPSIMHVQQQTELFWKPIVGGNITLHESSIACYSTVPPNPSYDLCIGVMTLLLHQGQLPQFQALSWYQPTMCNGNAPQNRRALIPVIVEDSKAMSVSSDAPRTP

SEQ ID NO: 108 - protein, 632 aa, Bat Paramyxovirus Eid_hel/GH-M74a/GHA/2009
  MISC_FEATURE: glycoprotein
MPQKTVEFINMNSPLERGVSTLSDKKTLNQSKITKQGYFGLGSHSERNWKKQKNQNDHYMTVSTMILEILVVLGIMFNLIVLTMVYYQNDNINQRMAELTSNITVLNLNLNQLTNKIQREIIPRITLIDTATTITIPSAITYILATLTTRISELLPSINQKCEFKTPTLVLNDCRINCTPPLNPSDGVKMSSLATNLVAHGPSPCRNFSSVPTIYYYRIPGLYNRTALDERCILNPRLTISSTKFAYVHSEYDKNCTRGFKYYELMTFGEILEGPEKEPRMFSRSFYSPTNAVNYHSCTPIVTVNEGYFLCLECTSSDPLYKANLSNSTFHLVILRHNKDEKIVSMPSFNLSTDQEYVQIIPAEGGGTAESGNLYFPCIGRLLHKRVTHPLCKKSNCSRTDDESCLKSYYNQGSPQHQVVNCLIRIRNAQRDNPTWDVITVDLTNTYPGSRSRIFGSFSKPMLYQSSVSWHTLLQVAEITDLDKYQLDWLDTPYISRPGGSECPFGNYCPTVCWEGTYNDVYSLTPNNDLFVTVYLKSEQVAENPYFAIFSRDQILKEFPLDAWISSARTTTISCFMFNNEIWCIAALEITRLNDDIIRPIYYSFWLPTDCRTPYPHTGKMTRVPLRSTYNY

SEQ ID NO: 109 - protein, 569 aa, Avian paramyxovirus 7
  MISC_FEATURE: hemagglutinin-neuraminidase
MESIGKGTWRTVYRVLTILLDVVIIILSVIALISLGLKPGERIINEVNGSIHNQLVPLSGITSDIQAKVSSIYRSNLLSIPLQLDQINQAISSSARQIADTINSFLALNGSGTFIYTNSPEFANGFNRAMFPTLNQSLNMLTPGNLIEFTNFIPTPTTKSGCIRIPSFSMSSSHWCYTHNIIASGCQDHSTSSEYISMGVVEVTDQAYPNFRTTLSITLADNLNRKSCSIAATGFGCDILCSVVTETENDDYQSPEPTQMIYGRLFFNGTYSEMSLNVNQMFADWVANYPAVGSGVELADFVIFPLYGGVKITSTLGASLSQYYYIPKVPTVNCSETDAQQIEKAKASYSPPKVAPNIWAQAVVRCNKSVNLANSCEILTFNTSTMMMGAEGRLLMIGKNVYFYQRSSSYWPVGIIYKLDLQELTTFSSNQLLSTIPIPFEKFPRPASTAGVCSKPNVCPAVCQTGVYQDLWVLYDLGKLENTTAVGLYLNSAVGRMNPFIGIANTLSWYNTTRLFAQGTPASYSTTTCFKNTKIDTAYCLSILELSDSLLGSWRITPLLYNITLSIMS

SEQ ID NO: 110 - protein, 588 aa, Tuhoko virus 2
  MISC_FEATURE: hemagglutinin-neuraminidase
MPPVPTVSQSIDEGSFTDIPLSPDDIKHPLSKKTCRKLFRIVTLIGVGLISILTIISLAQQTGILRKVDSSDFQSYVQESFKQVLNLMKQFSSNLNSLIEITSVTLPFRIDQFGTDIKTQVAQLVRQCNAVCRGPIKGPTTQNIVYPALYETSLNKTLETKNVRIQEVRQEVDPVPGPGLSNGCTRNPSFSVYHGVWCYTHATSIGNCNGSLGTSQLFRIGNVLEGDGGAPYHKSLATHLLTTRNVSRQCSATASYYGCYFICSEPVLTERDDYETPGIEPITIFRLDPDGNWVVFPNINRFTEYSLKALYPGIGSGVLFQGKLIFPMYGGIDKERLSALGLGNIGLIERRMADTCNHTEKELGRSFPGAFSSPYYHDAVMLNFLLICEMIENLPGDCDLQILNPTNMSMGSESQLSVLDNELFLYQRSASWWPYTLIYRLNMRYTGKYLKPKSIIPMVIKSNTRPGYEGCNHERVCPKVCVTGVFQAPWILSIGRDHKERVSNVTYMVAWSMDKSDRTYPAVSVCGSDTCKLTVPLGDSKVHSAYSVTRCYLSRDHMSAYCLVIFELDARPWAEMRIQSFLYKLILT

SEQ ID NO: 111 - protein, 582 aa, Tuhoko virus 3
  MISC_FEATURE: hemagglutinin-neuraminidase
MHNRTQSVSSIDTSSDVYLPRRKKAVTKFTFKKIFRVLILTLLLSIIIIIAVIFPKIDHIRETCDNSQILETITNQNSEIKNLINSAITNLNVLLTSTTVDLPIKLNNFGKSIVDQVTMMVRQCNAVCRGPGDRPTQNIELFKGLYHTSPPSNTSTKLSMITEASNPDDIVPRPGKLLGCTRFPSFSVHYGLWCYGHMASTGNCSGSSPSVQIIRIGSIGTNKDGTPKYVIIASASLPETTRLYHCSVTMTSIGCYILCTTPSVSETDDYSTMGIEKMSISFLSLDGYLTQLGQPTGLDNQNLYALYPGPGSGVIFRDFLIFPMMGGIRLMDAQKMLNRNITYRGFPPSETCTESELKLKQEVANMLTSPYYGEVLVLNFLYVCSLLDNIPGDCSVQLIPPDNMTLGAESRLYVLNGSLIMYKRGSSWWPYTELYQINYRVNNRAFRVRESVRINTTSTSRPGVQGCNLEKVCPKVCVSGIYQSPGIISAPVNPTRQEEGLLYFLVWTSSMSSRTGPLSSLCDHSTCRITYPIGDDTIFIGYTDSSCFMSSIKEGIYCIAFLELDNQPYSMMAIRSLSYIIN

SEQ ID NO: 112 - protein, 625 aa, Mojiang virus
  MISC_FEATURE: attachment glycoprotein
MATNRDNTITSAEVSQEDKVKKYYGVETAEKVADSISGNKVFILMNTLLILTGAIITITLNITNLTAAKSQQNMLKIIQDDVNAKLEMFVNLDQLVKGEIKPKVSLINTAVSVSIPGQISNLQTKFLQKYVYLEESITKQCTCNPLSGIFPTSGPTYPPTDKPDDDTTDDDKVDTTIKPIEYPKPDGCNRTGDHFTMEPGANFYTVPNLGPASSNSDECYTNPSFSIGSSIYMFSQEIRKTDCTAGEILSIQIVLGRIVDKGQQGPQASPLLVWAVPNPKIINSCAVAAGDEMGWVLCSVTLTAASGEPIPHMFDGFWLYKLEPDTEVVSYRITGYAYLLDKQYDSVFIGKGGGIQKGNDLYFQMYGLSRNRQSFKALCEHGSCLGTGGGGYQVLCDRAVMSFGSEESLITNAYLKVNDLASGKPVIIGQTFPPSDSYKGSNGRMYTIGDKYGLYLAPSSWNRYLRFGITPDISVRSTTWLKSQDPIMKILSTCTNTDRDMCPEICNTRGYQDIFPLSEDSEYYTYIGITPNNGGTKNFVAVRDSDGHIASIDILQNYYSITSATISCFMYKDEIWCIAITEGKKQKDNPQRIYAHSYKIRQMCYNMKSATVTVGNAKNITIRRY

SEQ ID NO: 113 - protein, 614 aa, Avian paramyxovirus 12
  MISC_FEATURE: hemagglutinin-neuraminidase
MESATSQVSFENDKTSDRRTWRAVFRVLMIILALSSLCVTVAALIYSAKAAIPGNIDASEQRILSSVEAVQVPVSRLEDTSQKIYRQVILEAPVTQLNMETNILNAITSLSYQIDASANSSGCGAPVHDSDFTGGVGRELLQEAEVNLTIIRPSKFLEHLNFIPAPTTGNGCTRIPSFDLGQTHWCYTHNVVLNGCRDRGHSFQYVALGILRTSATGSVFLSTLRSVNLDDDRNRKSCSVSATPIGCEMLCSLVTETEEGDYDSIDPTPMVHGRLGFDGKYREVDLSEKEIFADWRANYPAVGGGAFFGNRVWFPVYGGLKEGTQSERDAEKGYAIYKRFNNTCPDDNTTQIANAKASYRPSRFGGRFIQQGILSFKVEGNLGSDPILSLTDNSITLMGAEARVMNIENKLYLYQRGTSWFPSALVYPLDVANTAVKVRAPYIFDKFTRPGGHPCSASSRCPNVCVTGVYTDAYPLVFSRSHDIVAVYGMQLAAGTARLDPQAAIWYGNEMSTPTKVSSSTTKAAYTTSTCFKVTKTKRIYCISIAEIGNTLFGEFRIVPLLIEVQKTPLTRRSELRQQMPQPPIDLVIDNPFCAPSGNLSRKNAIDEYANSWP

SEQ ID NO: 114 - protein, 577 aa, Avian paramyxovirus
  MISC_FEATURE: hemagglutinin
MEPTGSKVDIVPSQGTKRTCRTFYRLLILILNLIIIILTIISIYVSISTDQHKLCNNEADSLLHSIVEPITVPLGTDSDVEDELREIRRDTGINIPIQIDNTENIILTTLASINSNIARLHNATDESPTCLSPVNDPRFIAGINKITKGSMIYRNFSNLIEHVNFIPSPTTLSGCTRIPSFSLSKTHWCYSHNVISTGCQDHAASSQYISIGIVDTGLNNEPYLRTMSSRLLNDGLNRKSCSVTAGAGVCWLLCSVVTESESADYRSRAPTAMILGRFNFYGDYTESPVPASLFSGRFTANYPGVGSGTQLNGTLYFPIYGGVVNDSDIELSNRGKSFRPRNPTNPCPDPEVTQSQRAQASYYPTRFGRLLIQQAILACRISDTTCTDYYLLYFDNNQVMMGAEARIYYLNNQMYLYQRSSSWWPHPLFYRFSLPHCEPMSVCMITDTHLILTYATSRPGTSICTGASRCPNNCVDGVYTDVWPLTEGTTQDPDSYYTVFLNSPNRRISPTISIYSYNQKISSRLAVGSEIGAAYTTSTCFSRTDTGALYCITIIEAVNTIFGQYRIVPILVQLISD

SEQ ID NO: 115 - protein, 620 aa, Salem virus
  MISC_FEATURE: attachment glycoprotein
MKAMHYYKNDFADPGTNDNSSDLTTNPFISNQIKSNLSPPVLAEGHLSPSPIPKFRKILLTISFVSTIVVLTVILLVLTIRILTIIEASAGDEKDIHTILSSLLNTFMNEYIPVFKNLVSIISLQIPQMLIDLKTSSTQMMQSLKTFPRDLETLSTVTQSVAVLLEKAKSTIPDINKFYKNVGKVTFNDPNIKVLTLEVPAWLPIVRQCLKQDFRQVISNSTGFALIGALPSQLFNEFEGYPSLAIVSEVYAITYLKGVMFENQENFLYQYFEIGTISPDGYNKPYFLRHTSVMLSTFKLSGKCTAAVDYRGGIFLCTPSPKIPKILQNPPDLPTLTVVSIPFDGRYTIRNISLMLTDEADIIYDLDTLQGRGVLQAMRFYALVRVISSSSPRHFPFCKNSWCPTADDKICDQSRRLGADGNYPVMYGLISIPAHSSYQGNVSLKLIDPKYYAYTRDASLFYNSMTDTYHYSFGTRGWVSRPIIGELLLGDDIVLTRYTVRSVSRATAGDCTTVSMCPQACSGGMNSIFYPLNFDKPQVTGVAIRQYERQQEGIIVVTMNDHYYYSVPIIKNGTLLISSVTDCFWLMGDLWCMSLMEKNNLPLGVRSLAHLTWNIHWSCS

SEQ ID NO: 116 - protein, 579 aa, Avian paramyxovirus 9
  MISC_FEATURE: hemagglutinin-neuraminidase
MESGISQASLVNDNIELRNTWRTAFRVVSLLLGFTSLVLTACALHFALNAATPADLSSIPVAVDQSHHEILQTLSLMSDIGNKIYKQVALDSPVALLNTESTLMSAITSLSYQINNAANNSGCGAPVHDKDFINGVAKELFVGSQYNASNYRPSRFLEHLNFIPAPTTGKGCTRIPSFDLAATHWCYTHNVILNGCNDHAQSYQYISLGILKVSATGNVFLSTLRSINLDDDENRKSCSISATPLGCDLLCAKVTEREEADYNSDAATRLVHGRLGFDGVYHEQALPVESLFSDWVANYPSVGGGSYFDNRVWFGVYGGIRPGSQTDLLQSEKYAIYRRYNNTCPDNNPTQIERAKSSYRPQRFGQRLVQQAILSIRVEPSLGNDPKLSVLDNTVVLMGAEARIMTFGHVALMYQRGSSYFPSALLYPLSLTNGSAAASKPFIFEQYTRPGSPPCQATARCPNSCVTGVYTDAYPLFWSEDHKVNGVYGMMLDDITSRLNPVAAIFDRYGRSRVTRVSSSSTKAAYTTNTCFKVVKTKRVYCLSIAEIENTLFGEFRITPLLSEIIFDPNLEPSDTSRN

SEQ ID NO: 117 - protein, 595 aa, Achimota virus 1
  MISC_FEATURE: attachment protein
MATNLSTITNGKFSQNSDEGSLTELPFFEHNRKVATTKRTCRFVFRSVITLCNLTILIVTVVVLFQQAGFIKRTESNQVCETLQNDMHGVVTMSKGVITTLNNLIEITSVNLPFQMKQFGQGIVTQVTQMVRQCNAVCKGPTIGPDIQNIVYPASYESMIKHPVNNSNILLSEIRQPLNFVPNTGKLNGCTRTPSFSVYNGFWCYTHAESDWNCNGSSPYMQVFRVGVVTSDYDYNVIHKTLHTKTSRLANVTYQCSTISTGYECYFLCSTPNVDEITDYKTPGIESLQIYKIDNRGTFAKFPITDQLNKELLTALYPGPGNGVLYQGRLLFPMHGGMQSSELNKVNLNNTVLSQFNDNKGCNATEIKLESEFPGTFTSPYYSNQVMLNYILICEMIENLPGNCDLQIVAPKNMSMGSESQLYSINNKLYLYQRSSSRWPYPLIYEVGTRLTNRQFRLRAINRFLIKSTTRPGSEGCNIYRVCPKVCVTGVYQAPWILHVSKAGSQSIAKVLYAVAWSKDHMSRKGPLFSICDNDTCFLTKSLASEHVHSGYSITRCYLENSERHIICVVIMELDASPWAEMRIQSVIYNITLPS

SEQ ID NO: 118 - protein, 583 aa, Achimota virus 2
  MISC_FEATURE: attachment protein
MDNSMSISTISLDAQPRIWSRHESRRTWRNIFRITSLVLLGVTVIICIWLCCEVARESELELLASPLGALIMAINTIKSSVVKMTTELNQVTFTTSIILPNKVDQFGQNVVSQVAQLVKQCNAVCRGHQDTPELEQFINQKNPTWILQPNYTTKLTNLHEIDSIIPLVDYPGFSKSCTRFPSFSEGSKFWCFTYAVVKEPCSDISSSIQVVKYGAIKANHSDGNPYLVLGTKVLDDGKFRRGCSITSSLYGCYLLCSTANVSEVNDYAHTPAYPLTLELISKDGITTDLSPTYTVQLDKWSALYPGIGSGVIFKGYLMFPVYGGLPFKSPLISASWVGPGNKWPVDFSCSEDQYSTFNFSNPYSALYSPHFSNNIVVSALFVCPLNENLPYSCEVQVLPQGNLTIGAEGRLYVIDQDLYYYQRSTSWWPYLQLYKLNIRITNRVFRVRSLSLLPIKSTTRPGYGNCTYFKLCPHICVTGVYQSPWLISIRDKRPHEEKNILYFIGWSPDEQIRQNPLVSLCHETACFINRSLATNKTHAGYSESHCVQSFERNKLTCTVFYELTAKPWAEMRVQSLLFQVDFL

SEQ ID NO: 119 - protein, 580 aa, Tuhoko virus 1
  MISC_FEATURE: hemagglutinin-neuraminidase
MDSRSDSFTDIPLDNRIERTVTSKKTWRSIFRVTAIILLIICVVVSSISLNQHNDAPLNGAGNQATSGFMDAIKSLEKLMSQTINELNQVVMTTSVQLPNRITKFGQDILDQVTQMVRQCNAVCRGPGVGPSIQNYVIQGHAPTVSFDPISAEYQKFVFGITEKTLITAYHNPWECLRFPSQHLFDTTWCVSYQILTQNCSDHGPRITVIQLGEIMIANNLSTVFRDPVIKYIRHHIWLRSCSVVAYYSQCTIFCTSTNKSEPSDYADTGYEQLFLATLQSDGTFTEHSMHGVNIVHQWNAIYGGVGNGVIIGRNMLIPLYGGINYYDHNTTIVQTVDLRPYPIPDSCSQTDNYQTNYLPSMFTNSYYGTNLVVSGYLSCRLMAGTPTSCSIRVIPIENMTMGSEGQFYLINNQLYYYKRSSNWIRDTQVYLLSYSDKGNIIEITSAERYIFKSVTSPDEGDCVTNHGCPSNCIGGLFQAPWILNDFKLCGSNITCPKIVTVWADQPDKRSNPMLSIAETDKLLLHKSYINYHTAVGYSTVLCFDSPKLNLKTCVVLQELMSDDKLLIRISYSIVSIMVE

SEQ ID NO: 120 - protein, 607 aa, Phocine distemper virus
  MISC_FEATURE: hemagglutinin protein
MFSHQDKVGAFYKNNARANSSKLSLVTDEVEERRSPWFLSILLILLVGILILLAITGIRFHQVVKSNLEFNKLLIEDMEKTKAVHHQVKDVLTPLFKIIGDEVGLRLPQKLNEIKQFIVQKTNFFNPNREFDFRELHWCINPPSKVKVNFTQYCEITEFKEATRSVANSILLLTLYRGRDDIFPPYKCRGATTSMGNVFPLAVSLSMSLISKPSEVINMLTAISEGIYGKTYLLVTDDTEENFETPEIRVFEIGFINRWLGDMPLFQTTNYRIISNNSNTKICTIAVGELALASLCTKESTILLNLGDEESQNSVLVVILGLFGATHMDQLEEVIPVAHPSIEKIHITNHRGFIKDSVATWMVPALALSEQGEQINCLRSACKRRTYPMCNQTSWEPFGDKRLPSYGRLTLSLDVSTDLSINVSVAQGPIIFNGDGMDYYEGTLLNSGWLTIPPKNGTILGLINQASKGDQFIVTPHILTFAPRESSTDCHLPIQTYQIQDDDVLLESNLVVLPTQSFEYVVATYDVSRSDHAIVYYVYDPARTVSYTYPFRLRTKGRPDILRIECFVWDGHLWCHQFYRFQLDATNSTSVVENLIRIRFSCDRLDP

SEQ ID NO: 121 - protein, 574 aa, Caprine parainfluenza virus 3
  MISC_FEATURE: hemagglutinin-neuraminidase
MEYWGHTNNPDKINRKVGVDQVRDRSKTLKIITFIISMMTSIMSTVALILILIMFIQNNNNNRIILQELRDETDAIEARIQKASNDIGVSIQSGINTRLLTIQNHVQNYIPLALTQQVSSLRESINDVITKREETQSKMPIQRMTHDDGIEPLIPDNFWKCPSGIPTISASPKIRLIPGPGLLATSTTINGCIRLPSLVINNLIYAYTSNLITQGCQDIGKSYQVLQIGIITINSDLVPDLNPRITHTFDIDDNRKSCSLALRNADVYQLCSTPKVDERSDYSSIGIEDIVLDIVTSEGTVSTTRFTNNNITFDKPYAALYPSVGPGIYYDNKIIFLGYGGLEHEENGDVICNITGCPGKTQHDCNQASYSPWFSNRRMVNAIILVNKGLNKVPSLQVWTIPMRQNYWGSEGRLLLLGNKIYIYTRSTSWHSKLQLGTLDISNYNDIRIRWTHHDVLSRPGSEECPWGNTCPRGCITGVYNDAYPLNPSGSVVSSVILDSRTSRENPIITYSTDTSRVNELAIRNNTLSAAYTTTNCVTHYGKGYCFHIIEINHKSLNTLQPMLFKTEIPKSCN

SEQ ID NO: 122 - protein, 414 aa, Avian metapneumovirus
  MISC_FEATURE: attachment glycoprotein
MGSELYIIEGVSSSEIVLKQVLRRSKKILLGLVLSALGLTLTSTIVISICISVEQVKLRQCVDTYWAENGSLHPGQSTENTSTRGKTTTKDPRRLQATGAGKFESCGYVQVVDGDMHDRSYAVLGGVDCLGLLALCESGPICQGDTWSEDGNFCRCTFSSHGVSCCKKPKSKATTAQRNSKPANSKSTPPVHSDRASKEHNPSQGEQPRRGPTSSKTTIASTPSTEDTAKPTISKPKLTIRPSQRGPSGSTKAASSTPSHKTNTRGTSKTTDQRPRTGPTPERPRQTHSTATPPPTTPIHKGRAPTPKPTTDLKVNPREGSTSPTAIQKNPTTQSNLVDCTLSDPDEPQRICYQVGTYNPSQSGTCNIEVPKCSTYGHACMATLYDTPFNCWRRTRRCICDSGGELIEWCCTSQ

SEQ ID NO: 123 - protein, 665 aa, Tupaia paramyxovirus
  MISC_FEATURE: hemagglutinin
MDYHSHTTQTGSNETLYQDPLQSQSGSRDTLDGPPSTLQHYSNPPPYSEEDQGIDGPQRSQPLSTPHQYDRYYGVNIQHTRVYNHLGTIYKGLKLAFQILGWVSVIITMIITVTTLKKMSDGNSQDSAMLKSLDENFDAIQEVANLLDNEVRPKLGVTMTQTTFQLPKELSEIKRYLLRLERNCPVCGTEATPQGSKGNASGDTAFCPPCLTRQCSEDSTHDQGPGVEGTSRNHKGKINFPHILQSDDCGRSDNLIVYSINLVPGLSFIQLPSGTKHCIIDVSYTFSDTLAGYLIVGGVDGCQLHNKAIIYLSLGYYKTKMIYPPDYIAIATYTYDLVPNLRDCSIAVNQTSLAAICTSKKTKENQDFSTSGVHPFYIFTLNTDGIFTVTVIEQSQLKLDYQYAALYPATGPGIFIGDHLVFLMWGGLMTKAEGDAYCQASGCNDAHRTSCNIAQMPSAYGHRQLVNGLLMLPIKELGSHLIQPSLETISPKINWAGGHGRLYYNWEINTTYIYIEGKTWRSRPNLGIISWSKPLSIRWIDHSVARRPGARPCDSANDCPEDCLVGGYYDMFPMSSDYKTAITIIPTHHQWPSSPALKLFNTNREVRVVMILRPPNNVKKTTISCIRIMQTNWCLGFIIFKEGNNAWGQIYSYIYQVESTCPNTK

SEQ ID NO: 124 - protein, 585 aa, Avian metapneumovirus
  MISC_FEATURE: attachment glycoprotein
MEVKVENVGKSQELKVKVKNFIKRSDCKKKLFALILGLVSFELTMNIMLSVMYVESNEALSLCRIQGTPAPRDNKTNTENATKETTLHTTTTTRDPEVRETKTTKPQANEGATNPSRNLTTKGDKHQTTRATTEAELEKQSKQTTEPGTSTQKHTPTRPSSKSPTTTQAIAQLTTPTTPKASTAPKNRQATTKKTETDTTTASRARNTNNPTETATTTPKATTETGKSKEGPTQHTTKEQPETTAGETTTPQPRRTASRPAPTTKIEEEAETTKTRTTKSTQTSTGPPRPTGGAPSGAATEGSGRAAAAGGPSAASAGGRRRTEAAAERDRRTRAGAGPTAGGARARTAAASERGADTAGSAGGGPGGDGATGGLSGGAPAEREDASGGTAAAGPGDGTEADGRAPPAAALAGRTTESAAGAAGDSGRAGTAGWGSAADGRSTGGNAAAEAGAAQSGRAAPRQPSGGTAPESTAPPNSGGSGRADAAPTEEVGVGSGLWRGRYVCGPCGESVPEHPMNPCFGDGTAWICSDDGGSLPAGCYDGGTDGVVCCGVCGGNSCCCGRVECTCGGGAGLLSCCCGSYSWS

SEQ ID NO: 125 - protein, 577 aa, Avian paramyxovirus 3
  MISC_FEATURE: hemagglutinin-neuraminidase protein
MESPPSGKDAPAFREPKRTCRLCYRATTLSLNLTIVVLSIISIYVSTQTGANNSCVNPTIVTPDYLTGSTTGSVEDLADLESQLREIRRDTGINLPVQIDNTENLILTTLASINSNLRFLQNATTESQTCLSPVNDPRFVAGINRIPAGSMAYNDFSNLIEHVNFIPSPTTLSGCTRIPSFSLSKTHWCYTHNVISNGCLDHAASSQYISIGIVDTGLNNEPYFRTMSSKSLNDGLNRKSCSVTAAANACWLLCSVVTEYEAADYRSRTPTAMVLGRFDFNGEYTEIAVPSSLFDGRFASNYPGVGSGTQVNGTLYFPLYGGVLNGSDIETANKGKSFRPQNPKNRCPDSEAIQSFRAQDSYYPTRFGKVLIQQAIIACRISNKSCTDFYLLYFDNNRVMMGAEARLYYLNNQLYLYQRSSSWWPHPLFYSISLPSCQALAVCQITEAHLTLTYATSRPGMSICTGASRCPNNCVDGVYTDVWPLTKNDAQDPNLFYTVYLNNSTRRISPTISLYTYDRRIKSKLAVGSDIGAAYTTSTCFGRSDTGAVYCLTIMETVNTIFGQYRIVPILLRVTSR

SEQ ID NO: 126 - protein, 585 aa, Avian metapneumovirus
  MISC_FEATURE: attachment glycoprotein
MEVKVENVGKSQELKVKVKNFIKRSDCKKKLFALILGLVSFELTMNIMLSVMYVESNEALSLCRIQGTPAPRDNKTNTENATKETTLHTTTTTRDPEVRETKTTKPQANEGATNPSRNLTTKGDKHQTTRATTEAELEKQSKQTTEPGTSTQKHTPARPSSKSPTTTQATAQPTTPTAPKASTAPKNRQATTKKTETDTTTASRARNTNNPTETATTTPKATTETGKGKEGPTQHTTKEQPETTARETTTPQPRRTASRPAPTTKIEEEAETTKTRTTKNTQTSTGPPRPTRSTPSKTATENNKRTTTTKRPNTASTDSRQQTRTTAEQDQQTQTRAKPTTNGAHPQTTTTPEHNTDTTNSTKGSPKEDKTTRDPSSKTPTEQEDASKGTAAANPGGSAEADRRAPPATTPTGRTTESAAGTTGDDSGAETTRRRSAADRRPTGGSTAAEAGTAQSGRATPKQPSGGTAAGNTAPPNNESSGRADAAPAEEAGVGPSIRRGRHACGPRRESAPEHPTNPCPGDGTAWTRSDGGGNLPAGRHDSGADGAARRGARGGNPRRRGRAERTRGGGAGPPSCRCGSHNRS

SEQ ID NO: 127 - protein, 389 aa, Avian metapneumovirus type D
  MISC_FEATURE: attachment glycoprotein
MGAKLYAISGASDAQLMKKTCAKLLEKVVPIIILAVLGITGTTTIALSISISIERAVLSDCTTQLRNGTTSGSLSNPTRSTTSTAVTTRDIRGLQTTRTRELKSCSNVQIAYGYLHDSSNPVLDSIGCLGLLALCESGPFCQRNYNPRDRPKCRCTLRGKDISCCKEPPTAVTTSKTTPWGTEVHPTYPTQVTPQSQPATMAHQTATANQRSSTTEPVGSQGNTTSSNPEQQTEPPPSPQHPPTTTSQDQSTETADGQEHTPTRKTPTATSNRRSPTPKRQETGRATPRNTATTQSGSSPPHSSPPGVDANMEGQCKELQAPKPNSVCKGLDIYREALPRGCDKVLPLCKTSTIMCVDAYYSKPPICFGYNQRCFCMETFGPIEFCCKS

SEQ ID NO: 128 - protein, 197 aa, Respiratory syncytial virus
  MISC_FEATURE: attachment glycoprotein
MSKNKNQRTARTLEKTWDTLNHLIVISSCLYKLNLKSIAQIALSVLAMIISTSLIIAAIIFIISANHKVTLTTVTVQTIKNHTEKNITTYLTQVSPERVSPSKQPTTTPPIHTNSATISPNTKSEIHHTTAQTKGRTSTPTQNNKPNTKPRPKNPPKKDDYHFEVFNFVPCSICGNNQLCKSICKTIPSNKPRKNQP

SEQ ID NO: 129 - protein, 580 aa, Avian paramyxovirus 14
  MISC_FEATURE: hemagglutinin-neuraminidase protein
MEGSRTVIYQGDPNEKNTWRLVFRTLTLILNLAILSVTIASIIITSKITLSEVTTLKTEGVEEVITPLMATLSDSVQQEKMIYKEVAISIPLVLDKIQTDVGTSVAQITDALRQIQGVNGTQAFALSNAPEYSGGIEVPLFQIDSFVNKSMSISGLLEHASFIPSPTTLHGCTRIPSFHLGPRHWCYTHNIIGSRCRDEGFSSMYISIGAITVNRDGNPLFITTASTILADDNNRKSCSIIASSYGCDLLCSIVTESENDDYANPNPTKMVHGRFLYNGSYVEQALPNSLFQDKWVAQYPGVGSGITTHGKVLFPIYGGIKKNTQLFYELSKYGFFAHNKELECKNMTEEQIRDIKAAYLPSKTSGNLFAQGIIYCNISKLGDCNVAVLNTSTTMMGAEGRLQMMGEYVYYYQRSSSWWPVGIVYKKSLAELMNGINMEVLSFEPIPLSKFPRPTWTAGLCQKPSICPDVCVTGVYTDLFSVTIGSTTDKDTYFGVYLDSATERKDPWVAAADQYEWRNRVRLFESTTEAAYTTSTCFKNTVNNRVFCVSIVELRENLLGDWKIVPLLFQIGVSQGPPPK

SEQ ID NO: 130 - protein, 1046 aa, Beilong virus
  MISC_FEATURE: attachment glycoprotein
MSQLAAHNLAMSNFYGTHQGDLSGSQKGEEQQVQGVIRYVSMIVGLLSLFTIIALNVTNIIYMTESGGTMQSIKTAQGSIDGSMREISGVIMEDVKPKTDLINSMVSYNIPAQLSMIHQIIKNDVLKQCTPSFMFNNTICPLAENPTHSRYFEEVNLDSISECSGPDMHLGLGVNPEFIEFPSFAPGSTKPGSCVRLPSFSLSTTVFAYTHTIMGHGCSELDVGDHYFSVGRIADAGHEIPQFETISSWFINDKINRRSCTVAAGAMEAWMGCVIMTETFYDDLNSLDTGKLTISYLDVFGRKKEWIYTRSEILYDYTYTSVYFSVGSGVVVGDTVYFLIWGSLSSPIEETAYCFAPDCSNYNQRMCNEAQRPSKFGHRQMVNGILKFKTTSTGKPLLSVGTLSPSVVPFGSEGRLMYSEITKIIYLYLRSTSWHALPLTGLFVLGPPTSISWIVQRAVSRPGEFPCGASNRCPKDCVTGVYTDLFPLGSRYEYAATVYLNSETYRVNPTLALINQTNIIASKKVTTESQRAGYTTTTCFVFKLRVWCISVVELAPSTMTAYEPIPFLYQLDLTCKGKNGSLAMRFTGKEGTYKSGRYKSPRNECFFEKVSNKYYFIVSTPEGIQPYEIRDLTPDRMPHIIMYISDVCAPALSAFKKLLPAMRPITTLTIGNWQFRPVEVSGGLRVSIGRNLTKEGDLTMSAPEDPGSNTFPGGHIPGNGLFDAGYYTVEYPKEWKQTTPKPSEGGNIIDKNKTPVIPSRDNPTSDSSIPHRESIEPVRPTREVLKSSDYVTIVSTDSGSGSGDFATGVPWTGVSPKAPQNGINLPGTELPHPTVLDRINTPAPSDPKVSADSDHTRDTIDPTALSKPLNHDTTGDTDTRINTGTATYGFTPGREATSSGKLANDLTNSTSVPSEAHPSASTSEASKPEKNTDNRVTQDPTSGTAERPTTNAPVDGKHSTQLTDARPNTADPERTSQHSSSTTRDEVKPSLPSTTEASTHQRTEAATPPELVNNTLNPPSTQVRSVRSLMQDAIAQAWNFVRGVTP

SEQ ID NO: 131 - protein, 618 aa, Avian paramyxovirus UPO216
  MISC_FEATURE: hemagglutinin-neuraminidase protein
MERGISEVALANDRTEEKNTWRLIFRITVLVVSVITLGLTAASLVYSMNAAQPADFDGIIPAVQQVGTSLTNSIGGMQDVLDRTYKQVALESPLTLLNMESTIMNAITSLSYKINNGGNSSGCGAPIHDPEYIGGIGKELLIDDNVDVTSFYPSAFKEHLNFIPAPTTGAGCTRIPSFDLSATHYCYTHNVILSGCQDHSHSHQYIALGVLKLSDTGNVFFSTLRSINLDDTANRKSCSISATPLGCDILCSKVTETELEDYKSEEPTPMVHGRLSFDGTYSEKDLDVNNLFSDWTANYPSVGGGSYIGNRVWYAVYGGLKPGSNTDQSQRDKYVIYKRYNNTCPDPEDYQINKAKSSYTPSYFGSKRVQQAILSIAVSPTLGSDPVLTPLSNDVVLMGAEGRVMHIGGYTYLYQRGTSYYSPALLYPLNIQDKSATASSPYKFDAFTRPGSVPCQADARCPQSCVTGVYTDPYPLIFAKDHSIRGVYGMMLNDVTARLNPIAAVFSNISRSQITRVSSSSTKAAYTTSTCFKVIKTNRIYCMSIAEISNTLFGEFRIVPLLVEILSNGGNTARSAGGTPVKESPKGWSDAIAEPLFCTPTNVTRYNADIRRYAYSWP

SEQ ID NO: 132 - protein, 576 aa, Atlantic salmon paramyxovirus
  MISC_FEATURE: hemagglutinin-neuraminidase protein
MPPAPSPVHDPSSFYGSSLFNEDTASRKGTSEEIHLLGIRWNTVLIVLGLILAIIGIGIGASSFSASGITGNTTKEIRLIVEEMSYGLVRISDSVRQEISPKVTLLQNAVLSSIPALVTTETNTIINAVKNHCNSPPTPPPPTEAPLKKHETGMAPLDPTTYWTCTSGTPRFYSSPNATFIPGPSPLPHTATPGGCVRIPSMHIGSEIYAYTSNLIASGCQDIGKSYQNVQIGVLDRTPEGNPEMSPMLSHTFPINDNRKSCSIVTLKRAAYIYCSQPKVTEFVDYQTPGIEPMSLDHINANGTTKTWIYSPTEVVTDVPYASMYPSVGSGVVIDGKLVFLVYGGLLNGIQVPAMCLSPECPGIDQAACNASQYNQYLSGRQVVNGIATVDLMNGQKPHISVETISPSKNWFGAEGRLVYMGGRLYIYIRSTGWHSPIQIGVIYTMNPLAITWVTNTVLSRPGSAGCDWNNRCPKACLSGVYTDAYPISPDYNHLATMILHSTSTRSNPVMVYSSPTNMVNYAQLTTTAQIAGYTTTSCFTDNEVGYCATALELTPGTLSSVQPILVMTKIPKECV

SEQ ID NO: 133 - DNA, 1122 bp, artificial sequence
  ApoE.HCR-hAAT
gttaggctcagaggcacacaggagtttctgggctcaccctgcccccttccaacccctcagttcccatcctccagcagctgtttgtgtgctgcctctgaagtccacactgaacaaacttcagcctactcatgtccctaaaatgggcaaacattgcaagcagcaaacagcaaacacacagccctccctgcctgctgaccttggagctggggcagaggtcagagacctctctgggcccatgccacctccaacatccactcgaccccttggaatttcggtggagaggagcagaggttgtcctggcgtggtttaggtagtgtgagaggggtacccggggatcttgctaccagtggaacagccactaaggattctgcagtgagagcagagggccagctaagtggtactctcccagagactgtctgactcacgccaccccctccaccttggacacaggacgctgtggtttctgagccaggtacaatgactcctttcggtaagtgcagtggaagctgtacactgcccaggcaaagcgtccgggcagcgtaggcgggcgactcagatcccagccagtggacttagcccctgtttgctcctccgataactggggtgaccttggttaatattcaccagcagcctcccccgttgcccctctggatccactgcttaaatacggacgaggacagggccctgtctcctcagcttcaggcaccaccactgacctgggacagtgaatgatccccctgatctgcggcctcgacggtatcgataagcttgatatcgaattctagtcgtcgaccactttcacaatctgctagcaacctgaggaggttatcgtacgaaattcgctgtctgcgagggccagctgttggggtgagtactccctctcaaaagcgggcatgacttctgcgctaagattgtcagtttccaaaaacgaggaggatttgatattcacctggcccgcggtgatgcctttgagggtggccgcgtccatctggtcagaaaagacaatctttttgttgtcaagcttgaggtgtggcaggcttgagatcgatctgaccatacacttgagtgacaatgacatccactttgcctttctctccacaggtgtccactcccaggtccaac

SEQ ID NO: 134 - DNA, 2428 bp, artificial sequence
  LP1B
ccaccgcggtggcggccgctctagcttccttagcatgacgttccacttttttctaaggtggagcttacttctttgatttgatcttttgtgaaacttttggaaattacccatcttcctaagcttctgcttctctcagttttctgcttgctcattccacttttccagctgaccctgccccctaccaacattgctccacaagcacaaattcatccagagaaaataaattctaagttttatagttgtttggatcgcataggtagctaaagaggtggcaacccacacatccttaggcatgagcttgattttttttgatttagaaccttcccctctctgttcctagactacactacacattctgcaagcatagcacagagcaatgttctactttaattactttcattttcttgtatcctcacagcctagaaaataacctgcgttacagcatccactcagtatcccttgagcatgaggtgacactacttaacatagggacgagatggtactttgtgtctcctgctctgtcagcagggcactgtacttgctgataccagggaatgtttgttcttaaataccatcattccggacgtgtttgccttggccagttttccatgtacatgcagaaagaagtttggactgatcaatacagtcctctgcctttaaagcaataggaaaaggccaacttgtctacgtttagtatgtggctgtagaaagggtatagatataaaaattaaaactaatgaaatggcagtcttacacatttttggcagcttatttaaagtcttggtgttaagtacgctggagctgtcacagctaccaatcaggcatgtctgggaatgagtacacggggaccataagttactgacattcgtttcccattccatttgaatacacacttttgtcatggtattgcttgctgaaattgttttgcaaaaaaaaccccttcaaattcatatatattattttaataaatgaattttaatttatctcaatgttataaaaaagtcaattttaataattaggtacttatatacccaataatatctaacaatcatttttaaacatttgtttattgagcttattatggatgaatctatctctatatactctatatactctaaaaaagaagaaagaccatagacaatcatctatttgatatgtgtaaagtttacatgtgagtagacatcagatgctccatttctcactgtaataccatttatagttacttgcaaaactaactggaattctaggacttaaatattttaagttttagctgggtgactggttggaaaattttaggtaagtactgaaaccaagagattataaaacaataaattctaaagttttagaagtgatcataatcaaatattaccctctaatgaaaatattccaaagttgagctacagaaatttcaacataagataattttagctgtaacaatgtaatttgttgtctattttcttttgagatacagttttttctgtctagctttggctgtcctggaccttgctctgtagaccaggttggtcttgaactcagagatctgcttgcctctgccttgcaagtgctaggattaaaagcatgtgccaccactgcctggctacaatctatgttttataagagattataaagctctggctttgtgacattaatctttcagataataagtcttttggattgtgtctggagaacatacagactgtgagcagatgttcagaggtatatttgcttaggggtgaattcaatctgcagcaataattatgagcagaattactgacacttccattttatacattctacttgctgatctatgaaacatagataagcatgcaggcattcatcatagttttctttatctggaaaaacattaaatatgaaagaagcactttattaatacagtttagatgtgttttgccatcttttaatttcttaagaaatactaagctgatgcagagtgaagagtgtgtgaaaagcagtggtgcagcttggcttgaactcgttctccagcttgggatcgacctgcaggcatgcttccatgccaaggcccacactgaaatgctcaaatgggagacaaagagattaagctcttatgtaaaatttgctgttttacataactttaatgaatggacaaagtcttgtgcatgggggtgggggtggggttagaggggaacagctccagatggcaaacatacgcaagggatttagtcaaacaactttttggcaaagatggtatgattttgtaatggggtaggaaccaatgaaatgcgaggtaagtatggttaatgatctacagttattggttaaagaagtatattagagcgagtctttctgcacacagatcacctttcctatcaaccccgggatcccccgggctgcaggaattcgatatcaagcttatcgataccgtcgacctcgagggggggcccggtac

SEQ ID NO: 135 - DNA, 530 bp, artificial sequence
  LP1B
cggcctctagactcgagccctaaaatgggcaaacattgcaagcagcaaacagcaaacacacagccctccctgcctgctgaccttggagctggggcagaggtcagagacctctctgggcccatgccacctccaacatccactcgaccccttggaatttcggtggagaggagcagaggttgtcctggcgtggtttaggtagtgtgagagggtggacacaggacgctgtggtttctgagccagggggcgactcagatcccagccagtggacttagcccctgtttgctcctccgataactggggtgaccttggttaatattcaccagcagcctcccccgttgcccctctggatccactgcttaaatacggacgaggacagggccctgtctcctcagcttcaggcaccaccactgacctgggacagtgaatccggactctaaggtaaatataaaatttttaagtgtataatgtgttaaactactgattctaattgtttctctcttttagattccaacctttggaactgaaccggt

SEQ ID NO: 136 - DNA, 252 bp, artificial sequence
  HLP
tgtttgctgcttgcaatgtttgcccattttagggtggacacaggacgctgtggtttctgagccagggggcgactcagatcccagccagtggacttagcccctgtttgctcctccgataactggggtgaccttggttaatattcaccagcagcctcccccgttgcccctctggatccactgcttaaatacggacgaggacagggccctgtctcctcagcttcaggcaccaccactgacctgggacagtgaatc

SEQ ID NO: 137 - DNA, 212 bp, artificial sequence
  EF1a core promoter
gggcagagcgcacatcgcccacagtccccgagaagttggggggaggggtcggcaattgaacgggtgcctagagaaggtggcgcggggtaaactgggaaagtgatgtcgtgtactggctccgcctttttcccgagggtgggggagaaccgtatataagtgcagtagtcgccgtgaacgttctttttcgcaacgggtttgccgccagaacacag

SEQ ID NO: 138 - DNA, 1163 bp, artificial sequence
  EF1a
ggctccggtgcccgtcagtgggcagagcgcacatcgcccacagtccccgagaagttggggggaggggtcggcaattgaaccggtgcctagagaaggtggcgcggggtaaactgggaaagtgatgtcgtgtactggctccgcctttttcccgagggtgggggagaaccgtatataagtgcagtagtcgccgtgaacgttctttttcgcaacgggtttgccgccagaacacaggtaagtgccgtgtgtggttcccgcgggcctggcctctttacgggttatggcccttgcgtgccttgaattacttccacctggctccagtacgtgattcttgatcccgagctggagccaggggcgggccttgcgctttaggagccccttcgcctcgtgcttgagttgaggcctggcctgggcgctggggccgccgcgtgcgaatctggtggcaccttcgcgcctgtctcgctgctttcgataagtctctagccatttaaaatttttgatgacctgctgcgacgctttttttctggcaagatagtcttgtaaatgcgggccaggatctgcacactggtatttcggtttttgggcccgcggccggcgacggggcccgtgcgtcccagcgcacatgttcggcgaggcggggcctgcgagcgcggccaccgagaatcggacgggggtagtctcaagctggccggcctgctctggtgcctggcctcgcgccgccgtgtatcgccccgccctgggcggcaaggctggcccggtcggcaccagttgcgtgagcggaaagatggccgcttcccggccctgctccagggggctcaaaatggaggacgcggcgctcgggagagcgggcgggtgagtcacccacacaaaggaaaagggcctttccgtcctcagccgtcgcttcatgtgactccacggagtaccgggcgccgtccaggcacctcgattagttctggagcttttggagtacgtcgtctttaggttggggggaggggttttatgcgatggagtttccccacactgagtgggtggagactgaagttaggccagcttggcacttgatgtaattctccttggaatttggcctttttgagtttggatcttggttcattctcaagcctcagacagtggttcaaagtttttttcttccatttcaggtgtcgtga

SEQ ID NO: 139 - DNA, 510 bp, artificial sequence
  hPGK
ggggttggggttgcgccttttccaaggcagccctgggtttgcgcagggacgcggctgctctgggcgtggttccgggaaacgcagcggcgccgaccctgggtctcgcacattcttcacgtccgttcgcagcgtcacccggatcttcgccgctacccttgtgggccccccggcgacgcttcctgctccgcccctaagtcgggaaggttccttgcggttcgcggcgtgccggacgtgacaaacggaagccgcacgtctcactagtaccctcgcagacggacagcgccagggagcaatggcagcgcgccgaccgcgatgggctgtggccaatagcggctgctcagcggggcgcgccgagagcagcggccgggaaggggcggtgcgggaggcggggtgtggggcggtagtgtgggccctgttcctgcccgcgcggtgttccgcattctgcaagcctccggagcgcacgtcggcagtcggctccctcgttgaccgaatcaccgacctctctcccca

SEQ ID NO: 140 - DNA, 39 bp, artificial sequence
  mCMV
ggtaggcgtgtacggtgggaggcctatataagcagagct

SEQ ID NO: 141 - DNA, 1212 bp, artificial sequence
  Ubc
gtctaacaaaaaagccaaaaacggccagaatttagcggacaatttactagtctaacactgaaaattacatattgacccaaatgattacatttcaaaaggtgcctaaaaaacttcacaaaacacactcgccaaccccgagcgcatagttcaaaaccggagcttcagctacttaagaagataggtacataaaaccgaccaaagaaactgacgcctcacttatccctcccctcaccagaggtccggcgcctgtcgattcaggagagcctaccctaggcccgaaccctgcgtcctgcgacggagaaaagcctaccgcacacctaccggcaggtggccccaccctgcattataagccaacagaacgggtgacgtcacgacacgacgagggcgcgcgctcccaaaggtacgggtgcactgcccaacggcaccgccataactgccgcccccgcaacagacgacaaaccgagttctccagtcagtgacaaacttcacgtcagggtccccagatggtgccccagcccatctcacccgaataagagctttcccgcattagcgaaggcctcaagaccttgggttcttgccgcccaccatgccccccaccttgtttcaacgacctcacagcccgcctcacaagcgtcttccattcaagactcgggaacagccgccattttgctgcgctccccccaacccccagttcagggcaaccttgctcgcggacccagactacagcccttggcggtctctccacacgcttccgtcccaccgagcggcccggcggccacgaaagccccggccagcccagcagcccgctactcaccaagtgacgatcacagcgatccacaaacaagaaccgcgacccaaatcccggctgcgacggaactagctgtgccacacccggcgcgtccttatataatcatcggcgttcaccgccccacggagatccctccgcagaatcgccgagaagggactacttttcctcgcctgttccgctctctggaaagaaaaccagtgccctagagtcacccaagtcccgtcctaaaatgtccttctgctgatactggggttctaaggccgagtcttatgagcagcgggccgctgtcctgagcgtccgggcggaaggatcaggacgctcgctgcgcccttcgtctgacgtggcagcgctcgccgtgaggaggggggcgcccgcgggaggcgccaaaacccggcgcggaggcc

SEQ ID NO: 142 - DNA, 408 bp, artificial sequence
  SFFV
gtaacgccattttgcaaggcatggaaaaataccaaaccaagaatagagaagttcagatcaagggcgggtacatgaaaatagctaacgttgggccaaacaggatatctgcggtgagcagtttcggccccggcccggggccaagaacagatggtcaccgcagtttcggccccggcccgaggccaagaacagatggtccccagatatggcccaaccctcagcagtttcttaagacccatcagatgtttccaggctcccccaaggacctgaaatgaccctgcgccttatttgaattaaccaatcagcctgcttctcgcttctgttcgcgcgcttctgcttcccgagctctataaaagagctcacaacccctcactcggcgcgccagtcctccgacagactgagtcgcccggg

SEQ ID NO: 143 - RNA, 23 nt, artificial sequence
  miR-142
uguaguguuuccuacuuuaugga

SEQ ID NO: 144 - RNA, 21 nt, artificial sequence
  miR-142
cauaaaguagaaagcacuacu

SEQ ID NO: 145 - RNA, 23 nt, artificial sequence
  mir-181a-2
aacauucaacgcugucggugagu

SEQ ID NO: 146 - RNA, 22 nt, artificial sequence
  mir-181a-2
accacugaccguugacuguacc

SEQ ID NO: 147 - RNA, 23 nt, artificial sequence
  mir-181b-1
aacauucauugcugucggugggu

SEQ ID NO: 148 - RNA, 21 nt, artificial sequence
  mir-181b-1
cucacugaacaaugaaugcaa

SEQ ID NO: 149 - RNA, 22 nt, artificial sequence
  mir-181c
aacauucaaccugucggugagu

SEQ ID NO: 150 - RNA, 22 nt, artificial sequence
  mir-181c
aaccaucgaccguugaguggac

SEQ ID NO: 151 - RNA, 23 nt, artificial sequence
  mir-181a-1
aacauucaacgcugucggugagu

SEQ ID NO: 152 - RNA, 22 nt, artificial sequence
  mir-181a-1
accaucgaccguugauuguacc

SEQ ID NO: 153 - RNA, 23 nt, artificial sequence
  mir-181b-2
aacauucauugcugucggugggu

SEQ ID NO: 154 - RNA, 20 nt, artificial sequence
  mir-181b-2
cucacugaucaaugaaugca

SEQ ID NO: 155 - RNA, 23 nt, artificial sequence
  mir-181d
aacauucauuguugucggugggu

SEQ ID NO: 156 - RNA, 21 nt, artificial sequence
  mir-181d
ccaccgggggaugaaugucac

SEQ ID NO: 157 - RNA, 22 nt, artificial sequence
  miR-223
cguguauuugacaagcugaguu

SEQ ID NO: 158 - RNA, 22 nt, artificial sequence
  miR-223
ugucaguuugucaaauacccca

SEQ ID NO: 159 - RNA, 21 nt, miR-126
cauuauuacuuuugguacgcg

SEQ ID NO: 160 - RNA, 22 nt, artificial sequence
  miR-126
ucguaccgugaguaauaaugcg

SEQ ID NO: 161 - DNA, 628 bp, artificial sequence
  hAAT
agatcttgctaccagtggaacagccactaaggattctgcagtgagagcagagggccagctaagtggtactctcccagagactgtctgactcacgccaccccctccaccttggacacaggacgctgtggtttctgagccaggtacaatgactcctttcggtaagtgcagtggaagctgtacactgcccaggcaaagcgtccgggcagcgtaggcgggcgactcagatcccagccagtggacttagcccctgtttgctcctccgataactggggtgaccttggttaatattcaccagcagcctcccccgttgcccctctggatccactgcttaaatacggacgaggacagggccctgtctcctcagcttcaggcaccaccactgacctgggacagtgaatgtccccctgatctgcggccgtgactctcttaaggtagccttgcagaagttggtcgtgaggcactgggcaggtaagtatcaaggttacaagacaggtttaaggagaccaatagaaactgggcttgtcgagacagagaagactcttgcgtttctgataggcacctattggtcttactgacatccactttgcctttctctccacaggtgtccactcccagttcaattacagct

SEQ ID NO: 162 - DNA, 577 bp, artificial sequence
  Enhanced transthyretin
ctcgaggtcaattcacgcgagttaataattaccagcgcgggccaaataaataatccgcgaggggcaggtgacgtttgcccagcgcgcgctggtaattattaacctcgcgaatattgattcgaggccgcgattgccgcaatcgcgaggggcaggtgacctttgcccagcgcgcgttcgccccgccccggacggtatcgataagcttaggagcttgggctgcaggtcgagggcactgggaggatgttgagtaagatggaaaactactgatgacccttgcagagacagagtattaggacatgtttgaacaggggccgggcgatcagcaggtagctctagaggatccccgtctgtctgcacatttcgtagagcgagtgttccgatactctaatctccctaggcaaggttcatatttgtgtaggttacttattctccttttgttgactaagtcaataatcagaatcagcaggtttggagtcagcttggcagggatcagcagcctgggttggaaggagggggtataaaagccccttcaccaggagaagccgtcacacagatccacaagctcctgccaccatgg

SEQ ID NO: 163 - DNA, 1503 bp, artificial sequence
  transthyretin
cccacctcccggagtcctctcctgcacattctcatgttcctgaaaggcttttctgtcccttccactactccctgtaagctcctgtgcttcacaatttcttgttgaattttttctaatctgactctatcagttatgggaatgttccctcaattcttagtgctccaaaccggacttgctcttggcttgtatttgtccaaaatatttgtcttctctatgttttctacatgtttgtcttataaggacaaaaacctgccttagtttatccatgaacaaagccacgcatgctagtggacacacacacacatgcgcgtgcgcgcgcacacacacacacacacacatacacacagagactttgtatgtgagtaatgaatcatcaaatcatcataatttctggacttgtattaataagtcggccaggaggaaaagaatctgctgtcaatcatggcttctggttctcacagtcatctctactttcttccagcaagtttggttctgtcaaaaaccagctgtcagccttgttcctgcatgcccaatgcagaagagtcagtaaagaagatttggttctctgtatttcaggggcatcaatgccaggttgaaatatgccattctggcccagctcagtggctcacacgtgtaatcccagcactttggaaggccaaagcgggtggattgcttgagctcaggagttcgagaccagcctgggcaagaggctgaggtgggaggatgacctgagcccgggaggtcaaggctgcagcgagctgtgatcgtgccactgcactcgagccagggcgttggagtgagaccctgtcaaaaaaaaaaaaaaaaaggaaggaaaaaaggaaggaaggaagggagggagggaagatgccattcttagattgaagtggactttatctgggcagaacacacacacacatacacacatgcacacacacattgtggagaaattgctgactaagcaaagcttccaaatgacttagtttggctaaaatgtaggcttttaaaaatgtgagcactgccaagggtttttccttgttgacccatggatccatcaagtgcaaacattttctaatgcactatatttaagcctgtgcagctagatgtcattcaacatgaaatacattattacaacttgcatctgtctaaaatcttgcatctaaaatgagagacaaaaaatctataaaaatggaaaacatgcatagaaatatgtgagggaggaaaaaattacccccaagaatgttagtgcacgcagtcacacagggagaagactatttttgttttgttttgattgttttgttttgttttggttgttttgttttggtgacctaactggtcaaatgacctattaagaatatttcatagaacgaatgttccgatgctctaatctctctagacaaggttcatatttgtatgggttacttattctctctttgttgactaagtcaataatcagaatcagcaggtttgcagtcagattggcagggataagcagcctagctcagg

SEQ ID NO: 164 - DNA, 1437 bp, artificial sequence
  Apoa2
ccgggcgtggtggcgcatgtctgtaatcccagctacttgggatgctgaggcaggagaatccttgaacccgggaggtggaggttgcagtgagccgagatcatgccattacgctccagcctgagcaacaagagcaaaactccgtctcaggaaaacaaacaaaaaaacctgcacatatacttctgaatttaaaacaaaagttaaaaaacaaagatttcttggtctctggtcactacctccctcatcagctttgcgcctccactgtcaccctcaggaatgttccacatactcagcgagtatgcttggggggcaaaagggtgaaagatacaaaagcttctgatatctatttaactgatttcacccaaatgctttgaacctgggaatgtacctctccccctcccccacccccaacaggagtgagacaagggccagggctattgcccctgctgactcaatattggctaatcactgcctagaactgataaggtgatcaaatgaccaggtgccttcaacctttaccctggtagaagcctcttattcacctcttttcctgccagagccctccattgggaggggacgggcggaagctgttttctgaatttgttttactgggggtagggtatgttcagtgatcagcatccaggtcattctgggctctcctgttttctccccgtctcattacacattaactcaaaaacggacaagatcatttacacttgccctcttacccgaccctcattcccctaacccccatagccctcaaccctgtccctgatttcaattcctttctcctttcttctgctccccaatatctctctgccaagttgcagtaaagtgggataaggttgagagatgagatctacccataatggaataaagacaccatgagctttccatggtatgatgggttgatggtattccatgggttgatatgtcagagctttccagagaaataacttggaatcctgcttcctgttgcactcaagtccaaggacctcagatctcaaaagaatgaacctcaaatatacctgaagtgtacccccttagcctccactaagagctgtaccccctgcctctcaccccatcaccatgagtcttccatgtgcttgtcctctcctcccccatttctccaacttgtttatcctcacataatccctgccccactgggcccatccatagtccctgtcacctgacagggggtgggtaaacagacaggtatatagccccttcctctccagccagggcaggcacagacaccaaggacagagacgctggctaggtaagataaggaggcaagatgtgtgagcagcatccaaagaggcctgggcttcagttgtggagagggagagagccaggttggaatgggcagcaggtagggagatccctggggaggagctgaagcccatttggcttcagtgtcccccaaacccccaccaccct

SEQ ID NO: 165 - DNA, 1267 bp, artificial sequence
  Cyp3a4
agctcctggggcctgccctcctcccattagaaaatcctccacttgtcaaaaaggaagccatttgctttgaactccaattccacccccaagaggctgggaccatcttattggagtccttgatgctgtgtgacctgcagtgaccactgccccatcattgctggctgaggtggttggggtccatctggctatctgggcagctgttctcttctctcctttctctcctgtttccagacatgcagtatttccagagagaaggggccactctttggcaaagaacctgtctaacttgctatctatggcaggacctttgaagggttcacaggaagcagcacaaattgatactattccaccaagccatcagctccatctcatccatgccctgtctctcctttaggggtccccttgccaacagaatcacagaggaccagcctgaaagtgcagagacagcagctgaggcacagccaagagctctggctgtattaatgacctaagaagtcaccagaaagtcagaagggatgacatgcagaggcccagcaatctcagctaagtcaactccaccagcctttctagttgcccactgtgtgtacagcaccctggtagggaccagagccatgacagggaataagactagactatgcccttgaggagctcacctctgttcagggaaacaggcgtggaaacacaatggtggtaaagaggaaagaggacaataggattgcatgaaggggatggaaagtgcccaggggaggaaatggttacatctgtgtgaggagtttggtgaggaaagactctaagagaaggctctgtctgtctgggtttggaaggatgtgtaggagtcttctagggggcacaggcacactccaggcataggtaaagatctgtaggtgtggcttgttgggatgaatttcaagtattttggaatgaggacagccatagagacaagggcaggagagaggcgatttaatagattttatgccaatggctccacttgagtttctgataagaacccagaacccttggactccccagtaacattgattgagttgtttatgatacctcatagaatatgaactcaaaggaggtcagtgagtggtgtgtgtgtgattctttgccaacttccaaggtggagaagcctcttccaactgcaggcagagcacaggtggccctgctactggctgcagctccagccctgcctccttctctagcatataaacaatccaacagcctcactgaatcactgctgtgcagggcaggaaagctccatgca

SEQ ID NO: 166 - DNA, 661 bp, artificial sequence
  MIR122
gaatgcatggttaactacgtcagaaatgaccagttcaagaggagaatgagattggcttccaaatgttggtcaagagctctacgtagcatgagccaaggatctattgaacttagtaggctcctgtgaccggtgactcttctgtctctagaaatctggggaggtgaccaggtcatacatggcagtcttcccgtgaggaacgttaaactggttggaagttggggttctgaggggaagatgtattcactaggtgacctgtcttctctgcctcggtggcctccatggctgcctgctggccgcacacccccactcagcagaggaatggactttccaatcttgctgagtgtgtttgaccaaaggtggtgctgacttagtggcctaaggtcgtgccctccctcccccactgaatcgataaataatgcgacttatcagaaagagaaagaattgtttacttttaaaccctggatcccataaagggagaggggagaggcctaaagccacagaagctgtggaaggcgccatcctgcctgccacaggaagggccttggactgagaggaccggagctgactgggggtaagtgcggctctcccccggcgcctgccgacccccctgagtgatcaggccgttctttggggtggccgctgaccgagaaatgacgggagg

SEQ ID NO: 167 - DNA, 1299 bp, artificial sequence
  hemopexin
gcagctttgggagtgggcccaggaagtactgaggatagcaggtgagatcccaggaagagatggatgtggggccgagacactggagagagaaacaggactgtcagataaagggcgtctgtgactcctagatctcattatgcctactaccataacctacccccaattcctaatattctcctaccctagagggggggaaattgtcagaaatttggctgcaacactagcaacactactcagtacttgaaatgcatttttgcatttttttcattcaacaaatatttctggaacaactcttatatgccaggcactattttaggagtcagggatatataatggtaaacaagacaggcaaaacaaagcaaagcaacaacaaccatcaccagataagtagacagatgaaagaatttcaagttttagtaagtaaaataaaacaagcaagggtctgaaatggctagataaggtggtcaagaaaggcttcattgagaaggtagcatttaagcaggagtcagctagaaatattgtgaaattccagttacagttctatttgttctgggttggttaaataaagctttttcccccaaggtggaaactaccaagaaagactaattactagtagtggtggtgctctctggaagagagacacctcctgtttctgcctcattactgtcaacccttcacttccaggcactttttgcaaagccctttgccagtcagggaaggcgagaggctgggcatggggcttggacatttgacaacagtgagacattattgtccccagactcactagcccaagggtaaagctgaagaggcttgggcatgccccagaaaggcccctgatgaagcttggaaaaagctgttctctgagtatttctaagtaagtttatctgtgtgtgtggttactaaaagtagtaagtattgctgtctctagctgccttagagcagggcttgacacagtacacagcaatattagttccctccttttctcacctcccccattgtggagataaactcaatcacaaaaggtgatcctcagtctactcacttccctgacttatggatgcctggacccattgccagtgtgagagtcacagctggacgtcagcagtgtagcccagttactgcttgaaaattgctgaagggggttggggggcagctgccgggaaaaaggagtcttggattcagatttctgtccagaccctgaccttatttgcagtgatgtaatcagccaatattggcttagtcctgggagacagcacattcccagtagagttggaggtgggggtggtgctgctgccaact

SEQ ID NO: 168 - DNA, 1594 bp, artificial sequence
  VEC
cccctgccctcctcctctgccctctcctggcattcctccttcatcatgggaccctcttctaatggatccccaaatgtcagagggtccaagtcctccctccctccaagctcatccatgcccatggcctcagatgccagccataagctgttgggttccaaacctcgactccaggctggactcacccctgtctcccccaccagcctgacacctccacctgggtatctaacgagcatctcaaactcaacctgcctgagacagaggaatcactatcccctcctcctccaaaaatatccttccatcacactccccatcttgtgctctgatttactaaacggccctgggccctctctttctcagggtctctgcttgcccagctatataataaaacaagtttgggacttcccaaccattcacccatggaaaaacagaagcaactcttcaaaggacagattcccaggatctgccctgggagattccaaatcagttgatctggggtgagcccagtcctctgtagtttttagaagctcctcctatgtctctcctggtcagcagaatcttggcccctcccttccccccagcctcttggttcttctgggctctgatccagcctcagcgtcactgtcttccacgcccctctttgattctcgtttatgtcaaaagccttgtgaggatgaggctgtgattatccccattttacagatgaggaaactgtggctccaggatgacacaactggccagaggtcacatcagaagcagagctgggtcacttgactccacccaatatccctaaatgcaaacatcccctacagaccgaggctggcaccttagagctggagtccatgcccgctctgaccaggagaagccaacctggtcctccagagccaagagcttctgtccctttcccatctcctgaagcctccctgtcacctttaaagtccattcccacaaagacatcatgggatcaccacagaaaatcaagctctggggctaggctgaccccagctagatttttggctcttttataccccagctgggtggacaagcaccttaaacccgctgagcctcagcttcccgggctataaaatgggggtgatgacacctgcctgtagcattccaaggagggttaaatgtgatgctgcagccaagggtccccacagccaggctctttgcaggtgctgggttcagagtcccagagctgaggccgggagtaggggttcaagtggggtgccccaggcagggtccagtgccagccctctgtggagacagccatccggggccgaggcagccgcccaccgcagggcctgcctatctgcagccagcccagccctcacaaaggaacaataacaggaaaccatcccagggggaagtgggccagggccagctggaaaacctgaaggggaggcagccaggcctccctcgccagcggggtgtggctcccctccaaagacggtcggctgacaggctccacagagctccactcacgctcagccctggacggacaggcagtccaacggaacagaaacatccctcagcccacaggcacggtgagtgggggctcccacactcccctccaccccaaacccgccaccctgcg

SEQ ID NO: 169 - DNA, 1731 bp, artificial sequence
  PAL
atggactacaaagacgatgacgacaaggccaagacactgtctcaggcccagagcaagaccagcagccagcagtttagcttcaccggcaacagcagcgccaacgtgatcatcggcaaccagaagctgaccatcaacgacgtggccagagtggcccggaatggcacactggtgtccctgaccaacaacaccgatatcctgcagggcatccaggccagctgcgactacatcaacaacgccgtggaaagcggcgagcccatctacggcgtgacatctggctttggcggcatggctaatgtggccatcagcagagagcaggccagcgagctgcagaccaatctcgtgtggttcctgaaaaccggcgctggcaacaaactgcccctggctgatgttcgggctgccatgctgctgagagccaactctcacatgagaggcgccagcggcatccggctggaactgatcaagcggatggaaatcttcctgaacgctggcgtgaccccttacgtgtacgagtttggctctatcggcgcctccggcgatctggtgcctctgtcttacatcaccggcagcctgatcggcctggatcctagcttcaaggtggacttcaacggcaaagagatggacgcccctaccgctctgagacagctgaatctgagccctctgacactgctgcccaaagaaggcctggccatgatgaatggcaccagcgtgatgacagggatcgccgccaattgcgtgtacgacacccagatcctgaccgccattgccatgggagtgcacgccctggatattcaggccctgaacggcaccaaccagagctttcaccccttcatccacaacagcaagccccatcctggacagctgtgggccgctgatcagatgattagcctgctggccaacagccagctcgtgcgggatgagctggatggcaagcacgactacagagatcacgagctgatccaggaccggtacagcctgagatgcctgcctcagtatctgggccctatcgtggatggcatctctcagatcgccaagcagatcgagattgagatcaacagcgtgaccgacaatcccctgatcgacgtggacaaccaggcctcttatcacggcggcaactttctgggccagtacgtcggcatgggcatggaccacctgaggtactatatcggcctcctggccaagcacctggacgtgcaaattgccctgctggcaagccccgagttcagcaatggactgcctcctagcctgctcggcaaccgcgagagaaaagtgaacatgggcctgaagggcctgcagatctgtggcaactccatcatgcccctgctgaccttctacggcaactctatcgccgacagattccccacacacgccgagcagttcaaccagaacatcaactcccagggctacaccagcgccacactggctagaagaagcgtggacatcttccagaactacgtggcaatcgccctgatgtttggagtgcaggccgtggacctgcggacctacaagaaaacaggccactacgacgccagagccagcctgtctcctgccaccgagagactgtattctgccgtgcggcatgtcgtgggccagaagcctacaagcgacagaccctacatctggaacgacaacgagcagggcctcgacgagcacattgccagaatctctgccgatatcgctgccggcggagtgattgtgcaggctgtgcaagacatcctgccaagcctgcactga
